(19) United States
(12) Patent Application Publication
(10) Pub. No.: US 2010/0021950 A1
(43) Pub. Date: Jan. 28, 2010

(54) SCREENING METHOD FOR ANTI-DIABETIC COMPOUNDS

(76) Inventors: Eckhard LAMMERT, Dresden (DE); Irena Konstantinova, Dresden (DE)

Correspondence Address: FROMMER LAWRENCE & HAUG, 745 FIFTH AVENUE- 10TH FL., NEW YORK, NY, 10151, US

(21) Appl. No.: 12/502,674

(22) Filed: Jul. 14, 2009

Related U.S. Application Data
(63) Continuation-in-part of application No. PCT/EP2008/000353, filed on Jan. 17, 2008.

(30) Foreign Application Priority Data
Jan. 17, 2007 (EP) 07000920.4

(51) Int. Cl. C12Q 1/34

(52) U.S. Cl. 435/18

(57) ABSTRACT

The present invention relates to a method of identifying a compound suitable as a lead compound and/or as a medicament for the treatment and/or prevention of diabetes, the method comprising the steps of (a) contacting a test compound with a cell comprising a protein, wherein said protein (i) comprises or consists of the amino acid sequence of any one of SEQ ID NOs: 1 to 29; (ii) is encoded by a nucleic acid molecule comprising or consisting of the sequence of any one of SEQ ID NOs: 59 to 87; (iii) is a fragment of the protein according to (i) or (ii) and exhibits Eph-Receptor-Tyrosine-Kinase activity; or (iv) has a sequence at least 75% identical with the protein according to (i) or (ii) or with the fragment according to (iii) and exhibits Eph-Receptor-Tyrosine-Kinase activity; and (b) determining whether said test compound, upon contacting in step (a) inhibits the Eph receptor tyrosine kinase activity of said protein wherein said inhibition indicates a compound suitable as a lead compound and/or as a medicament for the treatment and/or prevention of diabetes.

[0001] The present invention relates to a method of identifying a compound suitable as a lead compound and/or as a medicament for the treatment and/or prevention of diabetes, the method comprising the steps of (a) contacting a test compound with a cell comprising a protein, wherein said protein (i) comprises or consists of the amino acid sequence of any one of SEQ ID NOs: 1 to 29; (ii) is encoded by a nucleic acid molecule comprising or consisting of the sequence of any one of SEQ ID NOs: 59 to 87; (iii) is a fragment of the protein according to (i) or (ii) and exhibits Eph-Receptor-Tyrosine-Kinase activity; or (iv) has a sequence at least 75% identical with the protein according to (i) or (ii) or with the fragment according to (iii) and exhibits Eph-Receptor-Tyrosine-Kinase activity; and (b) determining whether said test compound, upon contacting in step (a) inhibits the Eph receptor tyrosine kinase activity of said protein wherein said inhibition indicates a compound suitable as a lead compound and/or as a medicament for the treatment and/or prevention of diabetes.

[0002] Throughout this specification, several documents are cited. The disclosure content of these documents is herewith incorporated by reference (including all product descriptions and manufacturers' instructions).

[0003] The treatment of type II diabetes mellitus will be a major challenge in the near future since its global prevalence has dramatically increased over the past years and is expected to increase further. Furthermore, the fact that the pathogenic basis of this disease is complex and not well understood requires multiple therapies to be employed. Owing to estimations, which expect the number of patients suffering from type II diabetes to increase from currently 190 million to over 350 million individuals worldwide within the next 15 to 20 years, there is an urgent need for effective therapeutics. This increase is supposed to be caused by a number of factors including global population growth, aging, increasing urbanization and increased obesity. The aforementioned pathophysiologic complexity renders type II diabetes mellitus a heterogeneous disease where therapeutic interventions are complex and difficult. The rise in the prevalence of obesity appears to be closely associated with an increased insulin resistance in the population. Therefore, the improvement of insulin sensitivity is thought to be a promising approach for treatment. However, besides reduced insulin sensitivity, it appears that also impairment of beta-cell function is involved in the pathogenesis of type II diabetes. It has been shown that impaired glucose regulation is associated with defects of both insulin secretion and action. In light of these discoveries, the use of therapeutic agents that are capable of improving the glucose-mediated insulin secretion is desired. Up to now, sulfonylureas have been considered to be the first-line monotherapy of choice. Also their combination with other oral anti-diabetics is suggested by many guidelines on the pharmacological treatment of diabetes worldwide although they have been discovered more than 50 years ago (Prato and Pulizzi (2006) Metabolism 55, 20). Incretins such as glucagon-like peptide-1 (GLP-1), and dipeptidyl peptidase-4 (DPP-4) inhibitors, are currently developed as alternative treatments of type II diabetes with fewer side effects (Drucker and Nauck (2006) Lancet 368, 1696).

[0004] As evident from the foregoing, proper insulin secretion is crucial to the body's ability to cope with blood glucose. Insulin is the only blood glucose-lowering hormone and is secreted by the pancreatic beta-cells of the islets of Langerhans. After its synthesis, the hormone is processed into its biologically active form and stored in vesicles ready for release. In the event insulin secretion becomes necessary, the hormone is released via a complex process involving the interplay of several proteins with the vesicle (Rorsman and Renström (2003) Diabetologia 46, 1029).

[0005] Thus, pancreatic islets are strictly required for maintaining glucose homeostasis, and defects in their ability to adequately secrete insulin in response to glucose result in diabetes mellitus (Bell and Polonsky (2001) Nature 414, 788).

[0006] During embryonic development, beta-cells initially develop as scattered single cells (Lammert et al. (2001) Science 294, 564). However, they do not stay single, but aggregate with other beta-cells and endocrine cells to form pancreatic islets. While glucose metabolism cell-autonomously triggers insulin secretion (Maechler and Wollheim (2001) 414, 807), communication between beta-cells suppresses basal insulin secretion, but enhances glucose-stimulated insulin secretion. It therefore ensures that beta-cells secrete low amounts of insulin during times of starvation, but sufficient insulin after food up-take. In comparison with intact islets, dispersed islet cells display increased basal insulin secretion and decreased glucose-stimulated insulin secretion (Halban et al. (1982) Endocrinol. 111, 86; Bosco et al. (1989) Exp. Cell Res. 184, 72; Matta et al. (1994) Pancreas 9, 439; Hopcroft et al. (1985) Endocrinol. 117, 2073). Conversely, reaggregation of islet cells suppresses basal insulin secretion and enhances glucose-stimulated insulin secretion (Halban et al. (1982) Endocrinol. 111, 86; Maes and Pipeleers (1984) Endocrinol. 114, 2205; Meda et al. (1990) J. Clin. Invest. 86, 759). Similarly, aggregation of immortalized beta-cell lines, such as mouse or rat insulinoma cells, enhances glucose-stimulated insulin secretion (Luther et al. (2006) Biochem. Biophys. Res. Commun. 343, 99). Finally, inhibition of adherent junctions and gap junctions in beta-cells provides evidence that direct cell-cell communication between beta-cells is required for physiological insulin secretion and glucose homeostasis (Dahl et al. (1996) Development 1222, 2895; Hauge-Evans et al. (1999) Diabetes 48, 1402; Yamagata et al. (2002) Diabetes 51, 114; Ravier et al. (2005) Diabetes 54, 1798). In spite of all these observations, the molecular mechanism that allows beta-cell communication to suppress basal insulin secretion, but enhance glucose-stimulated insulin secretion remains elusive.

[0007] In view of the increasing prevalence of type II diabetes mellitus in the world's population, there is an increasing need for an appropriate treatment suitable to overcome the limitations of current therapeutics. Thus, the technical problem underlying the present invention is the provision of novel means and methods useful in the treatment and/or prevention of type II diabetes mellitus.

[0008] The solution to this problem is achieved by providing the embodiments as characterized in the claims.

[0009] Accordingly, the present invention relates to a method of identifying a compound suitable as a lead compound and/or as a medicament for the treatment and/or prevention of diabetes, the method comprising the steps of (a) contacting a test compound with a cell comprising a protein, wherein said protein (i) comprises or consists of the amino acid sequence of any one of SEQ ID NOs: 1 to 29; (ii) is encoded by a nucleic acid molecule comprising or consisting of the sequence of any one of SEQ ID NOs: 59 to 87; (iii) is a fragment of the protein according to (i) or (ii) and exhibits Eph-Receptor-Tyrosine-Kinase activity; or (iv) has a sequence at least 75% identical with the protein according to (i) or (ii) or with the fragment according to (iii) and exhibits E.ph-Receptor-Tyrosine-Kinase activity; and (b) determining whether said test compound, upon contacting in step (a) inhibits the Eph receptor tyrosine kinase activity of said protein wherein said inhibition indicates a compound suitable as a lead compound and/or as a medicament for the treatment and/or prevention of diabetes.

[0010] In accordance with the present invention, the term “compound” denotes, in one alternative a small molecule. Such a small molecule may be, for example, an organic molecule. Organic molecules relate or belong to the class of chemical compounds having a carbon basis, the carbon atoms linked together by carbon-carbon bonds. The original definition of the term organic related to the source of chemical compounds, with organic compounds being those carbon-containing compounds obtained from plant or animal or microbial sources, whereas inorganic compounds were obtained from mineral sources. Organic compounds can be natural or synthetic. Alternatively the compound may be an inorganic compound. Inorganic compounds are derived from mineral sources and include all compounds without carbon atoms (except carbon dioxide, carbon monoxide and carbonates). Alternatively, the compound may be a macromolecule of natural or synthetic origin. Natural macromolecules are, for example peptides, proteins such as antibodies, nucleic acid molecules such as DNA, RNA or aptamers or polysaccharides. Synthetic macromolecules are for example polymers consisting of covalently linked small organic molecules.

[0011] Small molecules have a molecular weight below 10000 Da, preferably less than 1000 Da, more preferably less than 500 Da and most preferably between 200 Da and 400 Da. Macromolecules have a molecular weight in the range of a few thousand up to several million Da. Preferably their molecular weight is more than 10000 Da, more preferably more than 100000 Da and most preferably between 150000 Da and 250000 Da.

[0012] “Nucleic acid molecules”, in accordance with the present invention, include DNA, such as cDNA or genomic DNA, and RNA. It is understood that the term “RNA” as used herein comprises all forms of RNA including mRNA, ncRNA (non-coding RNA), tRNA and rRNA. The term “non-coding RNA” includes siRNA (small interfering RNA), miRNA (micro RNA), rasiRNA (repeat associated RNA), snoRNA (small nucleolar RNA), and snRNA (small nuclear RNA). Further included are nucleic acid mimicking molecules known in the art such as synthetic or semisynthetic derivatives of DNA or RNA and mixed polymers, both sense and antisense strands. Such nucleic acid mimicking molecules or nucleic acid derivatives according to the invention include phosphorothioate nucleic acid, phosphoramidate nucleic acid, 2′-O-methoxyethyl ribonucleic acid, morpholino nucleic acid, hexitol nucleic acid (HNA) and locked nucleic acid (LNA) (see Braasch and Corey (2001) Chem Biol. 8, 1). LNA is an RNA derivative in which the ribose ring is constrained by a methylene linkage between the 2′-oxygen and the 4′-carbon. They may contain additional non-natural or derivatized nucleotide bases, as will be readily appreciated by those skilled in the art.

[0013] The term “antibody”, in accordance with the present invention, comprises polyclonal and monoclonal antibodies as well as derivatives or fragments thereof which still retain the binding specificity. Techniques for the production of antibodies are well known in the art and described, e.g. in Harlow and Lane “Antibodies, A Laboratory Manual”, Cold Spring Harbor Laboratory Press, 1988 and Harlow and Lane “Using Antibodies: A Laboratory Manual” Cold Spring Harbor Laboratory Press, 1999. The antibody of the invention also includes embodiments such as chimeric, single chain and humanized antibodies, as well as antibody fragments, like, inter alia, Fab fragments, as well as fusion proteins consisting of Eph, ephrin or phosphatase extracellular domains and Fc. Antibody fragments or derivatives further comprise F(ab′)₂, Fv or scFv fragments; see, for example, Harlow and Lane (1988) and (1999), loc. cit. Various procedures are known in the art and may be used for the production of such antibodies and/or fragments. Thus, the (antibody) derivatives can be produced by peptidomimetics. Further, techniques described for the production of single chain antibodies (see, inter alia, U.S. Pat. No. 4,946,778) can be adapted to produce single chain antibodies specific for polypeptide(s) and fusion proteins of this invention. Also, transgenic animals may be used to express humanized antibodies specific for polypeptides and fusion proteins of this invention. Most preferably, the antibody of this invention is a monoclonal antibody. For the preparation of monoclonal antibodies, any technique, which provides antibodies produced by continuous cell line cultures, can be used. Examples for such techniques include the hybridoma technique (Köhler and Milstein (1975) Nature 256, 495), the trioma technique, the human B-cell hybridoma technique (Kozbor (1983) Immunology Today 4, 72) and the EBV-hybridoma technique to produce human monoclonal antibodies (Cole et al. (1985) Monoclonal Antibodies and Cancer Therapy, Alan R. Liss, Inc., 77). Surface plasmon resonance as employed in the BlAcore system can be used to increase the efficiency of phage antibodies, which bind to an epitope of a polypeptide of the invention (Schier (1996) Human Antibodies Hybridomas 7, 97; Malmborg (1995) J. Immunol. Methods 183, 7). It is also envisaged in the context of this invention that the term “antibody” comprises antibody constructs, which may be expressed in cells, e.g. antibody constructs which may be transfected and/or transduced via, amongst others, viruses or plasmid vectors. The antibody described in the context of the invention is capable to specifically bind/interact with an epitope of Eph receptor tyrosine kinases, ephrin or protein tyrosine phosphatases for Eph receptor tyrosine kinases. The term “specifically binding/interacting with” as used in accordance with the present invention means that the antibody does not or essentially does not cross-react with an epitope of similar structure. Thus, the antibody does not bind to prior art carboxylesterase of the present invention. Cross-reactivity of a panel of antibodies under investigation may be tested, for example, by assessing binding of said panel of antibodies under conventional conditions to the epitope of interest as well as to a number of more or less (structurally and/or functionally) closely related epitopes. Only those antibodies that bind to the epitope of interest in its relevant context (e.g. a specific motif in the structure of a protein) but do not or do not essentially bind to any of the other epitope are considered specific for the epitope of interest and thus to be antibodies in accordance with this invention. Corresponding methods are described e.g. in Harlow and Lane, 1988 and 1999, loc cit. The antibody specifically binds to/interacts with conformational or continuous epitopes, which are unique Eph receptor tyrosine kinases, ephrin or protein tyrosine phosphatases for Eph receptor tyrosine kinases. A conformational or discontinuous epitope is characterized for polypeptide antigens by the presence of two or more discrete amino acid residues which are separated in the primary sequence, but come together on the surface of the molecule when the polypeptide folds into the native protein/antigen (Sela (1969) Science 166, 1365; Laver (1990) Cell 61, 553). The two or more discrete amino acid residues contributing to the epitope are present on separate sections of one or more polypeptide chain(s). These residues come together on the surface of the molecule when the polypeptide chain(s) fold(s) into a three-dimensional structure to constitute the epitope. In contrast, a continuous or linear epitope consists of two or more discrete amino acid residues, which are present in a single linear segment of a polypeptide chain.

[0014] The term “aptamer” in accordance with the present invention refers to DNA or RNA molecules or peptides that have been selected from random pools based on their ability to bind other molecules. Aptamers have been selected which bind nucleic acid, proteins, small organic compounds, and even entire organisms. A database of aptamers is maintained at http://aptamer.icmb.utexas.edu/.

In addition to the above, the following definitions can define aptamers. DNA or RNA aptamers consist of (usually short) strands of oligonucleotides, whereas peptide aptamers consist of a short variable peptide domain, attached at both ends to a protein scaffold. Nucleic acid aptamers are nucleic acid species that have been engineered through repeated rounds of in vitro selection or equivalently, SELEX (systematic evolution of ligands by exponential enrichment) to bind to various molecular targets such as small molecules, proteins, nucleic acids, and even cells, tissues and organisms. Peptide aptamers are proteins that are designed to interfere with other protein interactions inside cells. They consist of a variable peptide loop attached at both ends to a protein scaffold. This double structural constraint greatly increases the binding affinity of the peptide aptamer to levels comparable to an antibody's (nanomolar range). The variable loop length is typically comprised of 10 to 20 amino acids, and the scaffold may be any protein which have good solubility properties. Currently, the bacterial protein Thioredoxin-A is the most used scaffold protein, the variable loop being inserted within the reducing active site, which is a -Cys-Gly-Pro-Cys- loop in the wild protein, the two cysteins lateral chains being able to form a disulfide bridge. Other examples of common scaffolds include Green Fluorescent Protein (GFP), staphylococcal nuclease and the protease inhibitor Stefin A. Peptide aptamer selection can be made using different systems, but the most used is currently the yeast two-hybrid system.
Aptamers offer the utility for biotechnological and therapeutic applications as they offer molecular recognition properties that rival those of the commonly used biomolecules, in particular antibodies. In addition to their discriminate recognition, aptamers offer advantages over antibodies as they can be engineered completely in a test tube, are readily produced by chemical synthesis, possess desirable storage properties, and elicit little or no immunogenicity in therapeutic applications.

[0015] Non-modified aptamers are cleared rapidly from the bloodstream, with a half-life of minutes to hours, mainly due to nuclease degradation and clearance from the body by the kidneys, a result of the aptamer's inherently low molecular weight. Unmodified aptamer applications currently focus on treating transient conditions such as blood clotting, or treating organs such as the eye where local delivery is possible. This rapid clearance can be an advantage in applications such as in vivo diagnostic imaging. Several modifications, such as 2′-fluorine-substituted pyrimidines, polyethylene glycol (PEG) linkage, etc. are available to scientists with which the half-life of aptamers easily can be increased to the day or even week time scale.

[0016] The term “lead compound” in accordance with the present invention refers to a compound discovered with step (b) of the method of the invention which will be e.g. further optimized, in particular to be pharmaceutically more acceptable. The identified lead compounds may be optimized to arrive at a compound, which may be for example used in a pharmaceutical composition. Methods for the optimization of the pharmacological properties of compounds identified in screens, the lead compounds, are known in the art and comprise a method of modifying a compound identified as a lead compound to achieve: (i) modified site of action, spectrum of activity, organ specificity, and/or (ii) improved potency, and/or (iii) decreased toxicity (improved therapeutic index), and/or (iv) decreased side effects, and/or (v) modified onset of therapeutic action, duration of effect, and/or (vi) modified pharmacokinetic parameters (resorption, distribution, metabolism and excretion), and/or (vii) modified physico-chemical parameters (solubility, hygroscopicity, color, taste, odor, stability, state), and/or (viii) improved general specificity, organ/tissue specificity, and/or (ix) optimized application form and route by (i) esterification of carboxyl groups, or (ii) esterification of hydroxyl groups with carboxylic acids, or (iii) esterification of hydroxyl groups to, e.g. phosphates, pyrophosphates or sulfates or hemi-succinates, or (iv) formation of pharmaceutically acceptable salts, or (v) formation of pharmaceutically acceptable complexes, or (vi) synthesis of pharmacologically active polymers, or (vii) introduction of hydrophilic moieties, or (viii) introduction/exchange of substituents on aromates or side chains, change of substituent pattern, or (ix) modification by introduction of isosteric or bioisosteric moieties, or (x) synthesis of homologous compounds, or (xi) introduction of branched side chains, or (xii) conversion of alkyl substituents to cyclic analogues, or (xiii) derivatisation of hydroxyl group to ketales, acetates, or (xiv) N-acetylation to amides, phenylcarbamates, or (xv) synthesis of Mannich bases, imines, or (xvi) transformation of ketones or aldehydes to Schiff's bases, oximes, acetates, ketales, enolesters, oxazolidines, thiazolidines or combinations thereof.

[0017] The various steps recited above are generally known in the art. They include or rely on quantitative structure-activity relationship (QSAR) analyses (Kubinyi (1992) “Hausch-Analysis and Related Approaches”, VCH Verlag, Weinheim), combinatorial biochemistry, classical chemistry and others (see, for example, Holzgrabe and Bechtold (2000) Deutsche Apotheker Zeitung 140(8), 813).

[0018] The term “diabetes” as used throughout this specification refers to a disease in which the body does not properly control the amount of sugar in the blood. As a result, the level of sugar in the blood is too high. This disease occurs when the body does not produce enough insulin or does not use it properly. Diabetes is divided into two types, type I and type II diabetes. Type I diabetes has its onset in juvenile age and is characterized by a complete destruction of the islets of Langerhans. Type II diabetes correlates with obesity and insulin resistance, and has its onset in the adult age. It is characterized by an inability of the islets of Langerhans to secrete sufficient insulin to compensate for the body's increased demand for insulin.

[0019] The “cell” as recited throughout this specification refers to a primary cell or a cell from a cell line. Primary cells are cells which are directly obtained from an organism and which are not immortalized. Suitable primary cells are, for example, cells that are capable of secreting insulin such as pancreatic beta-cells from species such as mouse, rat, human, guinea pig, hamster, pig, dog, sheep, goat, donkey or cow, and are used either in the form of islets of Langerhans or isolated cells. The cell line may be, for example, selected from the rat insulinoma (RIN) cell lines such as INS-1 (Asfari et al. (1992) Endocrinol.130, 167), INS-2 (Asfari et al. (1992) Endocrinol.130, 167), RIN-r (Philippe et al. (1986) Endocrinol. 119, 2833) and RIN-m (Bathena et al. (1982) Diabetes 31, 521; Praz et al. (1983) Biochem. J. 210, 345; Philippe et al. (1987) J. Clin. Invest. 79, 351) or from the hamster insulinoma (HIT) cell lines such as HIT-T15 (Santerre et al. (1981) Proc. Natl. Acad. Sci. U.S.A. 78, 4339) or from mouse beta-cell lines expressing the SV40 large T-antigen (beta-TC lines) such as betaTC1, betaTC2, betaTC3 (Efrat et al. (1988) Proc. Natl. Acad. Sci. U.S.A. 85, 9037), betaTC6 (Poitout et al. (1995) Diabetes 44, 306), betaTC7 (Efrat et al. (1993) Diabetes 42, 901), betaTCtet (Efrat et al. (1995) Proc. Natl. Acad. Sci. U.S.A. 92, 3576) or from mouse insulinoma (MIN) cell lines such as MIN6 (Myazaki et al. (1990) Endocrinol. 127, 126).

[0020] As recited hereinabove, said cell comprises a protein wherein the protein comprises or consists of the amino acid sequence of any one of SEQ ID NOs: 1 to 29 or is encoded by a nucleic acid comprising or consisting of any one of SEQ ID NOs: 59 to 87. These sequences refer to the amino acid sequence or the nucleic acid sequence of different Eph receptor tyrosine kinases (see Table 1).

TABLE 1
Listing of the different amino acid and nucleic acid sequences referred to in
the present invention together with the corresponding GenBank Accession-No,
species and gene name.

| | | | SEQ ID NO | | SEQ ID NO |
|---|---|---|---|---|---|
| | | | (amino acid | | (nucleic acid |
| Name | Species | Accession No. | sequence) | Accession No. | sequence) |
| EphA1 | human | NP_005223 | 1 | NM_005232.3 | 59 |
| | mouse | NP_076069 | 2 | NM_023580.2 | 60 |
| | rat | XP_001072130 | 3 | XM_001072130 | 61 |
| EphA2 | human | NP_004422 | 4 | NM_004431.2 | 62 |
| | mouse | NP_034269 | 5 | NM_010139.2 | 63 |
| | rat | XP_001072610 | 6 | XM_001072610.1 | 64 |
| EphA4 | human | NP_004429 | 7 | NM_004438.3 | 65 |
| | mouse | NP_031962 | 8 | NM_007936.3 | 66 |
| | rat | XP_244186 | 9 | XM_244186.4 | 67 |
| EphA5 | human | NP_004430 | 10 | NM_004439.4 | 68 |
| | mouse | NP_031963 | 11 | NM_007937.2 | 69 |
| | rat | XP_001075222 | 12 | XM_001075222.1 | 70 |
| EphA7 | human | NP_004431 | 13 | NM_004440.2 | 71 |
| | mouse | NP_034271 | 14 | NM_010141.2 | 72 |
| EphA8 | human | NP_065387 | 15 | NM_020526.3 | 73 |
| | mouse | NP_031965 | 16 | NM_007939.1 | 74 |
| | rat | XP_001069777 | 17 | XM_001069777.1 | 75 |
| EphB2 | human | NP_004433 | 18 | NM_004442.6 | 76 |
| | mouse | NP_034272 | 19 | NM_010142 | 77 |
| | rat | XP_001069612 | 20 | XM_001069612.1 | 78 |
| EphB3 | human | NP_004434 | 21 | NM_004443.3 | 79 |
| | mouse | NP_034273 | 22 | NM_010143.1 | 80 |
| | rat | XP_221311 | 23 | XM_221311.4 | 81 |
| EphB4 | human | NP_004435 | 24 | NM_004444.4 | 82 |
| | mouse | NP_034274 | 25 | NM_010144.4 | 83 |
| | rat | XP_001069363 | 26 | XM_001069363.1 | 84 |
| EphB6 | human | NP_004436 | 27 | NM_004445.2 | 85 |
| | mouse | NP_031706 | 28 | NM_007680.2 | 86 |
| | rat | XP_001068490 | 29 | XM_001068490.1 | 87 |
| ephrin-A1 | mouse | NP_034237 | 30 | NM_010107.2 | 88 |
| | human | NP_004419 | 31 | NM_004428.2 | 89 |
| | rat | NP_446051 | 32 | NM_053599.2 | 90 |
| ephrin-A2 | mouse | NP_031935 | 33 | NM_007909.2 | 91 |
| | human | NP_001396 | 34 | NM_001405.2 | 92 |
| | rat | XP_001076723 | 35 | XM_001076723.1 | 93 |
| ephrin-A4 | mouse | NP_031936 | 36 | NM_007910.2 | 94 |
| | human | NP_005218 | 37 | NM_005227.2 | 95 |
| | rat | XP_001074474 | 38 | XM_001074474.1 | 96 |
| ephrin-A5 | human | NP_001953 | 39 | NM_001962.1 | 97 |
| | mouse | NP_997537 | 40 | NM_207654.1 | 98 |
| | rat | NP_446355 | 41 | NM_053903.1 | 99 |
| ephrin-B2 | mouse | NP_034241 | 42 | NM_010111.2 | 100 |
| | human | NP_004084 | 43 | NM_004093.2 | 101 |
| | rat | XP_001067856 | 44 | XM_001067856.1 | 102 |
| ephrin-B3 | human | NP_001397 | 45 | NM_001406.3 | 103 |
| | mouse | NP_031937 | 46 | NM_007911.3 | 104 |
| | rat | XP_001079433 | 47 | XM_001079433.1 | 105 |
| ACP-1d | human | NP_001035739 | 48 | NM_001040649.1 | 106 |
| ACP-1b | human | NP_009030 | 49 | NM_007099.2 | 107 |
| ACP-1c | human | NP_004291 | 50 | NM_004300.2 | 108 |
| ACP | mouse | NP_067305 | 51 | NM_021330.2 | 109 |
| ACP | rat | NP_067085 | 52 | NM_021262.2 | 110 |
| PTP-RO a | human | NP_109592 | 53 | NM_030667.1 | 111 |
| PTP-RO b | human | NP_002839 | 54 | NM_002848.2 | 112 |
| PTP-RO c | human | NP_109596 | 55 | NM_030671.1 | 113 |
| PTP-RO d | human | NP_109595 | 56 | NM_030670.1 | 114 |
| PTP-RO | mouse | NP_035346 | 57 | NM_011216.2 | 115 |
| PTP-D30 | rat | NP_059032 | 58 | NM_017336.1 | 116 |

[0021] It is of note that also all the sequences accessible through the GenBank Accession Nos. of Table 1 are within the scope of the present invention irrespective of whether the entry of the respective Accession No. is completely identical to the sequence displayed by the corresponding SEQ ID NO due to potential future updates in the database. Thus, this is to account for future corrections and modifications in the entries of GenBank, which might occur due to the continuing progress of science.

[0022] The term “fragment of the protein” as defined herein in connection with the various proteins refers to a portion of the protein comprising at least the amino acid residues necessary to maintain the biological activity of the protein.

[0023] In accordance with the invention, the term a “fragment of the protein . . . and exhibits Eph-Receptor-Tyrosine-Kinase activity” refers to a portion of the protein comprising at least the amino acid residues of the juxtamembrane region and kinase domain. Preferably, the fragment has a length of at least 200 amino acids, more preferably between 250 and 500 amino acids and most preferably between 300 and 350 amino acids. Furthermore, said fragment exhibits Eph-Receptor-Tyrosine-Kinase (Eph) activity. Eph-Receptor-Tyrosine-Kinase activity is characterized by transphosphorylation of Eph receptor intracellular domains and results in F-actin polymerization and suppression of Rac1 activity via GTP-exchange factors (GEFs) (Murai and Pasquale (2005) Neuron 46, 161). Methods to determine Eph-Receptor Tyrosine Kinase activity are well known to the person skilled in the art and include, but are not restricted to, kinase assays or assaying the binding of down-stream effectors, which are part of the Eph forward signalling pathway, to the Eph receptors. Down-stream proteins include Guanine nucleotide exchange factors (GEFs) such as ephexin (Shamah et al. (2001) Cell 105: 233) or Eph receptor tyrosine phosphatases (PTPs) such as ACP-1 (Stein et al. (1998) Genes&Dev 12:667) or PTP-RO (Shintani et al. (2006) Nat. Neurosci. 9: 761). The binding can be detected in vitro by using, for example, radioimmunoassay or ELISA.

[0024] Also encompassed by the present invention are sequences that at least exhibit 75% identity with the above-recited protein. Preferably, the identity is between 75 and 98% such as at least 80%, more preferred at least 90%, more preferred 95% and most preferred the identity is at least 98%. Such molecules may be splice forms, homologous molecules from other species, such as orthologs, or mutated sequences from the same species to mention the most prominent examples. To evaluate the identity level between two nucleotide or protein sequences, they can be aligned electronically using suitable computer programs known in the art. Such programs comprise BLAST (Altschul et al. (1990) J. Mol. Biol. 215, 403), variants thereof such as WU-BLAST (Altschul and Gish (1996) Methods Enzymol. 266, 460), FASTA (Pearson and Lipman (1988) Proc. Natl. Acad. Sci. USA 85, 2444) or implementations of the Smith-Waterman algorithm (SSEARCH, Smith and Waterman (1981) J. Mol. Biol., 147, 195). These programs, in addition to providing a pairwise sequence alignment, also report the sequence identity level (usually in percent identity) and the probability for the occurrence of the alignment by chance (P-value). Programs such as CLUSTALW (Higgins et al. (1994) Nucleic Acids Res. 22, 4673) can be used to align more than two sequences.

[0025] In accordance with the present invention an “Eph receptor tyrosine kinase” is a protein comprising extracellularly an ephrin-binding domain and two fibronectin type-IIII repeats, and a cytosolic portion comprising a juxtamembrane region, kinase domain, SAM (sterile alpha-motif) domain and a PSD-95,Deg,ZO-½ (PDZ) binding motif. These two portions are linked via a transmembrane domain. “Eph receptor tyrosine kinase activity” is, in accordance with the present invention, characterized by transphosphorylation (transfer of a phosphate group from a kinase molecule to another kinase molecule). Eph receptor tyrosine kinase activity is also characterized by interactions of Eph receptor tyrosine kinases with other proteins such as PDZ-domain-containing proteins and Rho-family guanine nucleotide exchange factors. Lastly, as discovered in the present invention, Eph receptor tyrosine kinase activity is characterized by decreased insulin secretion and Rac1 activity, as well as increased F-actin content.

[0026] “Inhibition of Eph receptor tyrosine kinase activity” is defined as a reduction of the above defined Eph receptor tyrosine kinase activity by performing one or more of the following effects: (i) the transcription of the gene encoding the protein to be inhibited is lowered, i.e. the level of mRNA is lowered, (ii) the translation of the mRNA encoding the protein to be inhibited is lowered, (iii) the protein performs its biochemical function with lowered efficiency in presence of the inhibitor, and (iv) the protein performs its cellular function with lowered efficiency in presence of the inhibitor.

[0027] In a preferred embodiment, the level of activity is less than 90%, more preferred less than 80%, 70%, 60% or 50% of the activity in absence of the inhibitor. Yet more preferred are inhibitors lowering the level down to less than 25%, less than 10%, less than 5% or less than 1% of the activity in absence of the inhibitor.

[0028] In case inhibition is the decrease of expression level of the protein, determination of the expression level of a protein can for example be carried out on the nucleic acid or protein level.

[0029] Methods for determining the expression of a protein on the nucleic acid level include, but are not limited to, northern blotting, PCR, RT-PCR or real RT-PCR. PCR is well known in the art and is employed to make large numbers of copies of a target sequence. This is done on an automated cycler device, which can heat and cool containers with the reaction mixture in a very short time. The PCR, generally, consists of many repetitions of a cycle which consists of: (a) a denaturing step, which melts both strands of a DNA molecule and terminates all previous enzymatic reactions; (b) an annealing step, which is aimed at allowing the primers to anneal specifically to the melted strands of the DNA molecule; and (c) an extension step, which elongates the annealed primers by using the information provided by the template strand. Generally, PCR can be performed, for example, in a 50 μl reaction mixture containing 5 μl of 10×PCR buffer with 1.5 mM MgCl₂, 200 μM of each deoxynucleoside triphosphate, 0.5 μl of each primer (10 μM), about 10 to 100 ng of template DNA and 1 to 2.5 units of Taq Polymerase. The primers for the amplification may be labeled or be unlabeled. DNA amplification can be performed, e.g., with a model 2400 thermal cycler (Applied Biosystems, Foster City, Calif.): 2 min at 94° C., followed by 30 to 40 cycles consisting of annealing (e. g. 30 s at 50° C.), extension (e. g. 1 min at 72° C., depending on the length of DNA template and the enzyme used), denaturing (e. g. 10 s at 94° C.) and a final annealing step at 55° C. for 1 min as well as a final extension step at 72° C. for 5 min. Suitable polymerases for use with a DNA template include, for example, E. coli DNA polymerase I or its Klenow fragment, T4 DNA polymerase, Tth polymerase, Taq polymerase, a heat-stable DNA polymerase isolated from Thermus aquaticus Vent, Amplitaq, Pfu and KOD, some of which may exhibit proof-reading function and/or different temperature optima. However, the person skilled in the art knows how to optimize PCR conditions for the amplification of specific nucleic acid molecules with primers of different length and/or composition or to scale down or increase the volume of the reaction mix. The “reverse transcriptase polymerase chain reaction” (RT-PCR) is used when the nucleic acid to be amplified consists of RNA. The term “reverse transcriptase” refers to an enzyme that catalyzes the polymerization of deoxyribonucleoside triphosphates to form primer extension products that are complementary to a ribonucleic acid template. The enzyme initiates synthesis at the 3′-end of the primer and proceeds toward the 5′-end of the template until synthesis terminates. Examples of suitable polymerizing agents that convert the RNA target sequence into a complementary, copy-DNA (CDNA) sequence are avian myeloblastosis virus reverse transcriptase and Thermus thermophilus DNA polymerase, a thermostable DNA polymerase with reverse transcriptase activity marketed by Perkin Elmer. Typically, the genomic RNA/cDNA duplex template is heat denatured during the first denaturation step after the initial reverse transcription step leaving the DNA strand available as an amplification template. High-temperature RT provides greater primer specificity and improved efficiency. U.S. patent application Ser. No. 07/746, 121, filed Aug. 15, 1991, describes a “homogeneous RT-PCR” in which the same primers and polymerase suffice for both the reverse transcription and the PCR amplification steps, and the reaction conditions are optimized so that both reactions occur without a change of reagents. Thermus thermophilus DNA polymerase, a thermostable DNA polymerase that can function as a reverse transcriptase, can be used for all primer extension steps, regardless of template. Both processes can be done without having to open the tube to change or add reagents; only the temperature profile is adjusted between the first cycle (RNA template) and the rest of the amplification cycles (DNA template). The RT Reaction can be performed, for example, in a 20 μl reaction mix containing: 4 μl of 5×AMV-RT buffer, 2 μl of Oligo dT (100 μg/ml), 2 μl of 10 mM dNTPs, 1 μl total RNA, 10 Units of AMV reverse transcriptase, and H₂O to 20 μl final volume. The reaction may be, for example, performed by using the following conditions: The reaction is held at 70 C.° for 15 minutes to allow for reverse transcription. The reaction temperature is then raised to 95 C.° for 1 minute to denature the RNA-cDNA duplex. Next, the reaction temperature undergoes two cycles of 95° C. for 15 seconds and 60 C.° for 20 seconds followed by 38 cycles of 90 C.° for 15 seconds and 60 C.° for 20 seconds. Finally, the reaction temperature is held at 60 C.° for 4 minutes for the final extension step, cooled to 15 C.°, and held at that temperature until further processing of the amplified sample. Any of the above mentioned reaction conditions may be scaled up according to the needs of the particular case. The resulting products are loaded onto an agarose gel and band intensities are compared after staining the nucleic acid molecules with an intercalating dye such as ethidiumbromide or SybrGreen. A lower band intensity of the sample derived from the cell treated with the test compound as compared to a non-treated cell indicates a compound that inhibits the protein.

[0030] Real-time PCR employs a specific probe, in the art also referred to as TaqMan probe, which has a reporter dye covalently attached at the 5′ end and a quencher at the 3′ end. After the TaqMan probe has been hybridized in the annealing step of the PCR reaction to the complementary site of the polynucleotide being amplified, the 5′ fluorophore is cleaved by the 5′ nuclease activity of Taq polymerase in the extension phase of the PCR reaction. This enhances the fluorescence of the 5′ donor, which was formerly quenched due to the close proximity to the 3′ acceptor in the TaqMan probe sequence. Thereby, the process of amplification can be monitored directly and in real time, which permits a significantly more precise determination of expression levels than conventional end-point PCR. Also of use in Real time RT-PCR experiments is a DNA intercalating dye such as SybrGreen for monitoring the de novo synthesis of double stranded DNA molecules.

[0031] Methods for the determination of the expression of a protein on the amino acid level include but are not limited to western blotting or polyacrylamide gel electrophoresis in conjunction with protein staining techniques such as Coomassie Brilliant blue or silver-staining. The total protein is loaded onto a polyacrylamide gel and electrophoresed. Afterwards, the separated proteins are transferred onto a membrane, e.g. a polyvinyldifluoride (PVDF) membrane, by applying an electrical current. The proteins on the membrane are exposed to an antibody specifically recognizing the protein of interest, here the Eph receptor tyrosine kinase. After washing, a second antibody specifically recognizing the first antibody and carrying a readout system such as a fluorescent dye is applied. The amount of the protein of interest is determined by comparing the fluorescence intensity of the protein derived from the cell treated with the test compound and the protein derived from a non-treated cell. A lower fluorescence intensity of the protein derived from the cell treated with the test compound indicates an inhibitor of the protein. Also of use in protein quantification is the Agilent Bioanalyzer technique.

[0032] In accordance with the present invention the term “determining whether said test compound inhibits the Eph receptor tyrosine kinase activity” refers to the determination of secreted insulin from said cell. Furthermore, it also refers to determination of Eph receptor phosphorylation, F-actin polymerization, Rac1 activity and cell-cell adhesion.

[0033] In accordance with the present invention, it was surprisingly found that, whereas the prior art provides no indication of the involvement of Eph-ephrin signalling in insulin secretion and glucose homeostasis, the interplay between Eph receptor tyrosine kinases and their corresponding ephrin ligands regulates insulin secretion in aggregated pancreatic beta-cells. The present invention for the first time shows that it is the communication between pancreatic beta-cells via Eph receptor tyrosine kinases and their ligands, the ephrins, which accounts for an optimal insulin secretory response to glucose, i.e. suppression of basal insulin secretion and enhancement of glucose-stimulated insulin secretion. Ephs and ephrins exhibit bidirectional signalling. Signalling events occur through both of the molecules. Conventionally, signalling through Ephs is referred to as forward signalling whereas signalling through ephrins is referred to as reverse signalling. Until the discoveries of the present invention, Ephs and ephrins were believed to be mainly involved in morphogenesis and pattern formation or in cell fate decisions (Pasquale (2005) Nat Rev Mol Cell Biol 6, 462). Ephs and ephrins are both present in mouse pancreatic islet cells, MIN6 cells (Example 1 and FIG. 1) as well as human pancreatic islets (Example 1 and FIG. 8). As evident from Example 2, ephrin-A5 is required for the regulation of insulin secretion from pancreatic beta-cells (see also FIG. 2). It could further be shown that Eph forward signalling, in contrast to ephrin reverse signalling, significantly decreases insulin secretion in pancreatic islets and beta-cells (see Examples 3, 5 and 7). Further evidence for the involvement of Eph in glucose stimulated insulin secretion is corroborated by phosphorylation level changes of Eph upon glucose stimulation (see Examples 9 and 10). Eph is dephosphorylated under glucose stimulation and this dephosphorylation is required for insulin secretion under stimulatory conditions. Whereas the applicants do not wish to be bound by any scientific theory, a model as outlined in FIG. 7 is proposed explaining the mechanisms underlying Eph-ephrin interactions in glucose-mediated insulin secretion. Thus, Eph receptor tyrosine kinases offer a new possibility to screen for anti-diabetic compounds as recited hereinabove.

[0034] Accordingly, the compounds identified by the above-recited method are capable of inhibiting transphosphorylation of Eph receptor tyrosine kinases. Said inhibition may be carried out, for example, by binding to the extracellular ephrin-binding site and thereby blocking said binding site without inducing the kinase activity. Inhibition may also be carried out by blocking the intracellular kinase domains of the Eph receptor tyrosine kinase and thereby preventing transphosphorylation of the receptor upon binding of the ligand. In both cases, no signalling will occur and consequently no inhibition of insulin secretion will take place. Thus, compounds that inhibit Eph receptor tyrosine kinase activity will also and in accordance with findings of the present invention increase insulin secretion. Based on the reported interaction of Eph receptors with Rho GTP-exchange factors (GEFs) (Murai and Pasquale (2005) Neuron 46, 161), an inhibition of such GEFs is also anticipated to increase insulin secretion.

[0035] To exert the above described effects, the compounds identified with the method of the present invention may act extracellularly or intracellularly. Compounds acting intracellularly may for example be an siRNA regulating down the expression level of the protein or compounds acting via inhibition of the cytosolic kinase domains. Compounds exerting their effects extracellularly may, for example, be compounds interfering with ephrin binding to the extracellular part of the Eph receptor tyrosine kinase. One example of such a compound may be an aptamer binding to the ephrin binding site.

[0036] Suitably, the method of the present invention is carried out in vitro. In vitro methods offer the possibility of establishing high-throughput assays, which are capable of screening up to several thousand compounds in parallel. High-throughput assays, independently of being biochemical, cellular or other assays, generally may be performed in wells of microtitre plates, wherein each plate may contain 96, 384 or 1536 wells. Handling of the plates, including incubation at temperatures other than ambient temperature, and bringing into contact of test compounds with the assay mixture is preferably effected by one or more computer-controlled robotic systems including pipetting devices. In case large libraries of test compounds are to be screened and/or screening is to be effected within short time, mixtures of, for example, 10, 20, 30, 40, 50 or 100 test compounds may be added to each well. In case a well shows inhibition of Eph receptor tyrosine kinase activity, said mixture of test compounds may be de-convoluted to identify the one or more test compounds in said mixture giving rise to said inhibition.

[0037] In another embodiment, the present invention relates to a method of identifying a compound suitable as a lead compound and/or as a medicament for the treatment and/or prevention of diabetes, the method comprising the steps of (a) contacting a test compound with a protein, wherein said protein (i) comprises or consists of the amino acid sequence of any one of SEQ ID NOs: 1 to 29, or (ii) is encoded by a nucleic acid molecule comprising or consisting of the sequence of any one of SEQ ID NOs: 59 to 87, or (iii) is a fragment of the protein according to (i) or (ii) and exhibits Eph-Receptor-Tyrosine-Kinase activity, or (iv) has a sequence at least 75% identical with the protein according to (i) or (ii) or with the fragment according to (iii) and exhibits Eph-Receptor-Tyrosine-Kinase activity; and (b) determining whether said test compound, upon contacting in step (a) inhibits the Eph receptor tyrosine kinase activity of said protein wherein said inhibition indicates a compound suitable as a lead compound and/or as a medicament for the treatment and/or prevention of diabetes.

[0038] The present invention thus also provides a biochemical assay for assessing the anti-diabetic properties of a given compound. Biochemical assays offer the advantage of being carried out without the need for extensive cell culture work as compared to a cellular assay as recited above. The protein may be purified from a natural source such as tissue obtained from a mammal like mouse, rat or human. Protein purification techniques are well known to those skilled in the art. Alternatively, the protein may be recombinantly expressed in bacteria or in a cell culture. For example, nucleic acid sequences comprising a nucleic acid molecule encoding the protein can be synthesized by PCR and inserted into an expression vector (for a detailed description of the PCR process see below). Non-limiting examples of expression vectors include vectors compatible with an expression in mammalian cells like pREP (Invitrogen), pcDNA3 (Invitrogen), pCEP4 (Invitrogen), pMC1neo (Stratagene), pXT1 (Stratagene), pSG5 (Stratagene), EBO-pSV2neo, pBPV-1, pdBPVMMTneo, pRSVgpt, pRSVneo, pSV2-dhfr, plZD35, pLXIN, pSIR (Clontech), pIRES-EGFP (Clontech), pEAK-10 (Edge Biosystems) pTriEx-Hygro (Novagen), pCINeo (Promega), Okayama-Berg cDNA expression vector pcDVl (Pharmacia), pRc/CMV, pcDNA1, pSPORT1 (GIBCO BRL), pGEMHE (Promega), pSVL and pMSG (Pharmacia, Uppsala, Sweden), pRSVcat (ATCC 37152), pSV2dhfr (ATCC 37146) or pBC12MI (ATCC 67109). Also suitable are prokaryotic plasmid vectors such as as the pUC-series, pBluescript (Stratagene), the pET-series of expression vectors (Novagen) or pCRTOPO (Invitrogen).

[0039] After purification of the protein, said protein can be brought into contact with the test compound by combining the test compound and the protein under conditions suitable for assessing the activity of the protein. For biological assays in many cases the presence of further substances, including other salts than sodium chloride, trace elements, amino acids, vitamins, growth factors, ubiquitous co-factors such as ATP or GTP, is required. Said further substances may either be added individually or provided in complex mixtures such as serum or cell extracts. These and further accessory substances are well known in the art as are concentrations suitable for biological assays.

[0040] Conditions suitable for assessing the activity of the protein in accordance with the present invention may vary significantly, for example when comparing the interior of a cell to the extracellular space. Exemplary intracellular conditions comprise 14 mM Na⁺, 140 mM K⁺, 10⁻⁷ mM Ca²⁺, 20 mM Mg²⁺, 4 mM Cl⁻, 10 mM HCO₃⁻, 11 mM HPO₄²⁻ and H₂PO₄⁻, 1 mM SO₄²⁻, 45 mM phosphocreatine, 14 mM carnosine, 8 mM amino acids, 9 mM creatine, 1.5 mM lactate, 5 mM ATP, 3.7 mM hexose monophosphate, 4 mM protein and 4 mM urea.

[0041] After contacting the protein with the test compound, the activity of the Eph receptor tyrosine kinase is determined. To do so, a kinase assay well known to those skilled in the art may be suitable. If the test compound inhibits the kinase activity of the Eph receptor tyrosine kinase, it is suitable as a medicament or as a lead compound in accordance with the present invention. Another particularly suitable assay is the binding of down-stream effectors, which are part of the Eph forward signalling pathway, to the Eph receptors. Down-stream proteins include Guanine nucleotide exchange factors (GEFs) such as ephexin (Shamah et al. (2001) Cell 105: 233) or Eph receptor tyrosine phosphatases (PTPs) such as ACP-1 (Stein et al. (1998) Genes&Dev 12:667) or PTP-RO (Shintani et al. (2006) Nat. Neurosci. 9: 761). The binding can be detected in vitro by using radioimmunoassay or ELISA.

[0042] In another embodiment, the present invention relates to a method of identifying a compound suitable as a lead compound and/or as a medicament for the treatment and/or prevention of diabetes, the method comprising the steps of (a) contacting a test compound with a cell comprising a protein, wherein said protein (i) comprises or consists of the amino acid sequence of any one of SEQ ID NOs: 48 to 58, or (ii) is encoded by a nucleic acid molecule comprising or consisting of the sequence of any one of SEQ ID NOs: 106 to 116, or (iii) is a fragment of the protein according to (i) or (ii) and acts as a protein tyrosine phosphatase for Eph receptor tyrosine kinases; or (iv) has a sequence at least 75% identical with the protein according to (i) or (ii) or with the fragment according to (iii) and acts as a protein tyrosine phosphatase for Eph receptor tyrosine kinases; and (b) determining whether said test compound, upon contacting in step (a) activates the expression and/or activity of said protein wherein said activation indicates a compound suitable as a lead compound and/or as a medicament for the treatment and/or prevention of diabetes. As regards the definition of sequence identity in the context of the present invention, it is referred to the discussion of sequence identity above.

[0043] In accordance with the present invention the term “a protein tyrosine phosphatase for Eph receptor tyrosine kinases” refers to proteins, which dephosphorylate Eph receptor tyrosine kinases in vitro or in vivo. Examples of such protein tyrosine phosphatases (PTP) are acid phosphatase-1 (ACP-1) and its isoforms ACP-1d (protein SEQ ID NO: 48; nucleic acid sequence SEQ ID NO: 106), ACP-1b (protein SEQ ID NO: 49; nucleic acid sequence SEQ ID NO: 107), ACP-1c (protein SEQ ID NO: 50; nucleic acid sequence SEQ ID NO: 108), mouse ACP (protein SEQ ID NO: 51; nucleic acid sequence SEQ ID NO: 109), rat ACP (protein SEQ ID NO: 52; nucleic acid sequence SEQ ID NO: 110) as well as protein tyrosine phosphatase receptor type O (PTP-RO) and its isoforms PTP-RO isoform a (protein SEQ ID NO: 53; nucleic acid sequence SEQ ID NO: 111), PTP-RO isoform b (protein SEQ ID NO: 54; nucleic acid sequence SEQ ID NO: 112), PTP-RO isoform c (protein SEQ ID NO: 55; nucleic acid sequence SEQ ID NO: 113), PTP-RO isoform d (protein SEQ ID NO: 56; nucleic acid sequence SEQ ID NO: 114), mouse PTP-RO (protein SEQ ID NO: 57; nucleic acid sequence SEQ ID NO: 115) or rat receptor-type protein tyrosine phosphatase D30 (protein SEQ ID NO: 58; nucleic acid sequence SEQ ID NO: 116).

[0044] As stated above, the phosphorylation state of Eph receptor tyrosine kinases depends on the glucose concentration. Eph receptor dephosphorylation is reported to occur through acid phosphatase-1 (ACP-1, also called low molecular weight protein tyrosine phosphatase LMW-PTP) (Parri et al. (2005) J. Biol. Chem. 280, 34008) and protein tyrosine phosphatase receptor type O (PTP-RO) (Shintani et al. (2006) Nat. Neurosci. 9, 761). In accordance with the present invention, it has been discovered that glucose stimulation induces a protein tyrosine phosphatase (PTP) activity that dephosphorylates Eph in pancreatic islets and insulinoma cells (see Examples 9 and 10). Accordingly, PTPs are also useful as a target to screen for compounds modulating insulin secretion by acting via the activation of PTPs. This assay has the advantage of being performed with a cytosolic protein or protein fragment, which is often easier to handle and analyze than transmembrane proteins such as Ephs and ephrins.

[0045] Determination of the activity of said protein is accomplished, for example, by measuring the Eph receptor phosphorylation rate in cells expressing ACP-1 and/or PTP-RO. This can be done by immunoprecipitation of EphA5 from cell lysates and subsequent Western blot with a phospho-tyrosine-specific antibody (4G10) (Santa Cruz). Alternatively, Eph receptor phosphorylation is determined by using a phospho-Eph-specific antiserum (Sharma et al. (2001) Cell 105, 233). Determination of the expression level of the PTP can be carried out as described above in the context of other embodiments of the present invention.

[0046] In accordance with the invention, the term a “fragment of the protein . . . and acts as a protein tyrosine phosphatase for Eph-Receptor-Tyrosine-Kinase activity” refers to a portion of the protein that exhibits protein tyrosine phosphatase activity for Eph-Receptor-Tyrosine-Kinase. Activity of said protein has been defined above. Generally, a preferred length of the fragment in particular for PTP-RO is at least 150 amino acids, more preferably between 200 and 400 amino acids and most preferably between 220 and 250 amino acids. A preferred length of the fragment in particular for ACP is, generally, at least 100 amino acids, more preferably at least 110 amino acids and most preferably at least 112 amino acids.

[0047] In another embodiment, the invention relates to a method of identifying a compound suitable as a lead compound and/or as a medicament for the treatment and/or prevention of diabetes, the method comprising the steps of (a) contacting a test compound with a protein, wherein said protein (i) comprises or consists of the amino acid sequence of any one of SEQ ID NOs: 48 to 58, or (ii) is encoded by a nucleic acid molecule comprising or consisting of the sequence of any one of SEQ ID NOs: 106 to 116, or (iii) is a fragment of the protein according to (i) or (ii) and acts as a protein tyrosine phosphatase for Eph receptor tyrosine kinases; or (iv) has a sequence at least 75% identical with the protein according to (i) or (ii) or with the fragment according to (iii) and acts as a protein tyrosine phosphatase for Eph receptor tyrosine kinases; and (b) determining whether said test compound, upon contacting in step (a) enhances the activity of said protein wherein said enhancement indicates a compound suitable as a lead compound and/or as a medicament for the treatment and/or prevention of diabetes.

[0048] As recited above in the context of another embodiment, a biochemical assay which uses the PTP directly is also envisaged by the present invention. As outlined above, a biochemical assay offers the possibility to circumvent extensive cell culture work. A possible readout for assessing the enhancement of the activity is already provided above in the context of the corresponding cellular screening method. Detailed methods for performing all necessary steps to arrive at a suitable setup for performing the assay are also provided above in the context of the other embodiments relating to biochemical assays. A particularly suitable method is to determine the activity of the phosphatase in vitro by using a phosphopeptide of the juxtamembrane domain of Eph receptors, e.g. VDPFT(‘P’-Y)EDPN of EphA4 (Shintani et al. (2006) Nat. Neurosci. 9, 761) together with the recombinant phosphatase in a conventional protein tyrosine phosphatase assay (e.g. SIGMA). The latter method could be used for compound screens by using radioimmunoassay or ELISA.

[0049] In another embodiment, the invention relates to a method of identifying a compound suitable as a lead compound and/or as a medicament for the treatment and/or prevention of diabetes, the method comprising the steps of (a) contacting a test compound with a cell comprising a protein, wherein said protein (i) comprises or consists of the amino acid sequence of any one of SEQ ID NOs: 30 to 47, or (ii) is encoded by a nucleic acid molecule comprising or consisting of the sequence of any one of SEQ ID NOs: 88 to 105, or (iii) is a fragment of the protein according to (i) or (ii) and exhibits ephrin activity, or (iv) has a sequence at least 75% identical with the protein according to (i) or (ii) or with the fragment according to (iii) and exhibits ephrin activity; and (b) determining whether said test compound, upon contacting in step (a) activates the expression and/or activity of said protein wherein said activation indicates a compound suitable as a lead compound and/or as a medicament for the treatment and/or prevention of diabetes.

[0050] The term “ephrin activity” refers to an activity that, on the one hand induces transphosphorylation of Eph receptor tyrosine kinases and on the other hand induces ephrin reverse signalling. Ephrin reverse signalling results in enhanced activity of Rac1 as well as decreased cortical F-actin (Example 8, FIG. 5). Since ephrin-A reverse signalling is mimicked by reduced expression of the beta-cell gap junction protein connexin-36 (Example 8, FIG. 13), it is conceivable that ephrin-A reverse signalling inhibits gap junction communication between beta-cells. The main effect of ephrin-A reverse signalling is an increase in insulin secretion (Examples 3, 4 and 6, FIGS. 3, 4 and 9).

[0051] In accordance with the invention, the term a “fragment of the protein . . . and exhibits ephrin activity” refers to a portion of the protein that exhibits ephrin activity. Ephrin activity has been defined above. Generally, a preferred length of the fragment is at least 100 amino acids, more preferably at least 150 amino acids and most preferably at least 186 amino acids.

[0052] As stated above, ephrins are involved in insulin secretion from pancreatic beta-cells. Therefore, ephrins whose amino acid sequences are represented by SEQ ID NOs: 30 to 47 and whose encoding nucleic acid sequences are represented by SEQ ID NOs: 88 to 105 offer the possibility to screen for compounds in a cellular assay as described above. Ephrins represent a functionally different target as compared to Eph receptor tyrosine kinases since ephrins act in an opposite manner to Eph receptor tyrosine kinases with respect to insulin secretion (see above and Examples 3 to 7). Therefore, compounds stimulating insulin secretion via ephrins may be structurally different to compounds acting via Eph receptor tyrosine kinases.

[0053] In a preferred embodiment, the cell is a pancreatic beta-cell or a cell from a beta-cell line.

[0054] Suitable pancreatic beta-cells are, for example, from species such as mouse, rat, human, guinea pig, hamster, pig, dog, sheep, goat, donkey or cow, and are used either in the form of islets of Langerhans or isolated cells. The cell line may be, for example, selected from the rat insulinoma (RIN) cell lines such as INS-1 (Asfari et al. (1992) Endocrinol.130, 167), INS-2 (Asfari et al. (1992) Endocrinol.130, 167), RIN-r (Philippe et al. (1986) Endocrinol. 119, 2833) and RIN-m (Bathena et al. (1982) Diabetes 31, 521; Praz et al. (1983) Biochem. J. 210, 345; Philippe et al. (1987) J. Clin. Invest. 79, 351) or from the hamster insulinoma (HIT) cell lines such as HIT-T15 (Santerre et al. (1981) Proc. Natl. Acad. Sci. U.S.A. 78, 4339) or from mouse beta-cell lines expressing the SV40 large T-antigen (beta-TC lines) such as betaTC1, betaTC2, betaTC3 (Efrat et al. (1988) Proc. Natl. Acad. Sci. U.S.A. 85, 9037), betaTC6 (Poitout et al. (1995) Diabetes 44, 306), betaTC7 (Efrat et al. (1993) Diabetes 42, 901), betaTCtet (Efrat et al. (1995) Proc. Natl. Acad. Sci. U.S.A. 92, 3576) or from mouse insulinoma (MIN) cell lines such as MIN6 (Myazaki et al. (1990) Endocrinol. 127, 126).

[0055] In a preferred embodiment, determining in step (b) comprises quantifying insulin secretion.

[0056] The direct quantification of insulin secretion has the advantage of delivering a direct physiological read-out of the effect of the screened compound since insulin secretion is the desired result when screening for anti-diabetic compounds.

[0057] Preferably, determination of insulin secretion is carried out by methods including but not limited to ELISA kits (such as the one from Crystal Chem Inc.) or radioimmunoassays (such as the one from Linco, St. Charles, Mo., USA).

[0058] Generally, determination of insulin secretion is carried out at glucose concentrations in the range of 6 to 30 mM, more preferably 10 to 30 mM, and most preferably 20 to 25 mM, or in the presence of, for example, a combination of glucose and glucagon-like peptide-1 (GLP-1) or glucose and 3-isobutyl-1 -methylxanthine (IBMX).

[0059] In another preferred embodiment, determining in step (b) comprises quantifying F-actin in said cell, wherein the quantity of F-actin is determined at stimulatory glucose concentrations and wherein a decreased quantity of F-actin in the cell contacted with the test compound indicates a compound suitable as a lead compound and/or as a medicament for the treatment and/or prevention of diabetes.

[0060] The term “stimulatory glucose concentrations” generally refers to glucose concentrations in the range of 5.5 to 30 mM, more preferably 10 to 30 mM, and most preferably 20 to 25 mM. A preferred range in particular for studying activation of ephrin-A reverse signalling is 6 to 20 mM, most preferably 6 to 8 mM.

[0061] In addition to their involvement in glucose stimulated insulin secretion, the present invention shows opposite effects of Eph and ephrin signalling on F-actin. Moderate destabilization of F-actin was shown to enhance insulin secretion, while F-actin stabilization was shown to inhibit insulin secretion (Cable et al. (1995) Biochem. J. 307: 169; Wang et al. (1990) Biochem. Biophys. Res. Commun. 171: 424; Wilson et al. (2001) FEBS Lett 492: 101; Lawrence et al. (2003) Proc. Natl. Acad. Sci. U.S.A. 100: 13320; Tomas et al. (2006) J. Cell Sci. 119: 2156; Orci et al. (1972) Science 175: 1128; Jijakli et al. (2002) Int. J. Mol. Med. 9: 165; Thurmond et al. (2003) Mol. Endocrinol. 17: 732; Tsuboi et al. (2003) J. Biol. Chem. 278: 52042). The present invention now, for the first time, establishes a link between the F-actin content of a cell in response to a glucose stimulus and the molecular interaction between Ephs and ephrins (see Example 5). Quantification of F-actin is much easier than direct quantification of insulin secretion since no time-consuming assays, such as ELISA, are required but rather simple fluorescence measurements. Therefore, using the F-actin content as a readout renders the establishment of a high throughput assay for screening for anti-diabetic compounds less difficult.

[0062] Quantification of F-actin in said cell may, for example, be carried out by methods including but not limited to fluorescence measurements or F-actin ELISA.

[0063] In another preferred embodiment, the protein as referred to above is comprised in a cell expressing, or transfected with, a nucleic acid encoding said protein.

[0064] The cell is preferably a primary cell such as a pancreatic beta-cell or a cell from a cell line. Examples of suitable cell lines are referred to above.

[0065] Transfection of a cell or a cell line with a nucleic acid encoding the protein referred to above allows for adaptation of the screening method of the invention to the experimental set-up, such as the use of a different cell line capable of growing under culture conditions which are, for example, easier to implement.

[0066] In a more preferred embodiment, the cell comprising the protein referred to above is comprised in a non-human animal.

[0067] Introduction or expression of the protein referred to above in a non-human animal allows for the screening method of the invention to be performed under physiological conditions and opens the way for the identification of compounds which are, besides their anti-diabetic activity, capable of being efficiently absorbed, distributed, eventually metabolized to their biologically active form and excreted in a pharmacologically acceptable manner. Preferably, the animal is selected from, for example, rat, mouse, hamster, guinea pig, dog, cow, pig, goat, sheep or donkey.

[0068] A method for the production of a transgenic non-human animal, for example a transgenic mouse, comprises introduction of the nucleic acid molecules referred to above into a germ cell, an embryonic cell, stem cell or an egg or a cell derived therefrom. The non-human animal can be used in accordance with the invention in a method for identification of compounds useful for the treatment and/or prevention of diabetes. Production of transgenic embryos and screening of those can be performed, e.g., as described by A. L. Joyner Ed., Gene Targeting, A Practical Approach (1993), Oxford University Press. The DNA of the embryonic membranes of embryos can be analyzed using, e.g., Southern blots with an appropriate probe. A general method for making transgenic non-human animals is described in the art, see for example WO 94/24274. For making transgenic non-human organisms (which include homologously targeted non-human animals), embryonic stem cells (ES cells) are preferred. Murine ES cells, such as AB-1 line grown on mitotically inactive SNL76/7 cell feeder layers (McMahon and Bradley (1990) Cell 62,1073) essentially as described (Robertson, E. J. (1987) in Teratocarcinomas and Embryonic Stem Cells: A Practical Approach. E. J. Robertson, ed. (Oxford: IRL Press), p. 71) may be used for homologous gene targeting. Other suitable ES cell lines include, but are not limited to, the E14 line (Hooper et al. (1987) Nature 326, 292), the D3 line (Doetschman et al. (1985) J. Embryol. Exp. Morph. 87, 27), the CCE line (Robertson et al. (1986) Nature 323, 445), the AK-7 line (Zhuang et al. (1994) Cell 77, 875). The success of generating a mouse line from ES cells bearing a specific targeted mutation depends on the pluripotence of the ES cells (i. e., their ability, once injected into a host developing embryo, such as a blastocyst or morula, to participate in embryogenesis and contribute to the germ cells of the resulting animal). The blastocysts containing the injected ES cells are allowed to develop in the uteri of pseudopregnant non-human females and are born, e.g. as chimeric mice. The resultant transgenic mice are chimeric for cells having either the recombinase or reporter loci and are backcrossed and screened for the presence of the correctly targeted transgene(s) by PCR or Southern blot analysis on tail biopsy DNA of offspring so as to identify transgenic mice heterozygous for either the recombinase or reporter locus/loci. For example, for beta-cell specific and pancreas-specific gene manipulation, the rat insulin promoter (RIP-1 and RIP-2) and pancreas-duodenum-homeobox-1 (Pdx1) promoter can be used, respectively. These promoters are generally used to drive the gene of interest in a constitutive or inducible fashion.

[0069] In a more preferred embodiment, determining in step (b) involves quantifying insulin secretion in said non-human animal.

[0070] The invention also relates to the use of an activator of ephrin activity for the manufacture of a pharmaceutical composition for treating diabetes wherein said activator is selected from the group consisting of (a) a fusion protein consisting of the extracellular domain of an Eph receptor tyrosine kinase and an Fc chain; (b) a dominant-negative deletion mutant protein of an Eph receptor tyrosine kinase lacking the cytoplasmic tail; (c) a nucleic acid molecule encoding the protein of (a) or (b); (d) a vector comprising the nucleic acid molecule of (c); and (e) a host comprising the vector of (d).

[0071] The term “activator”, in accordance with the present invention, is defined as a compound enhancing the activity of a target molecule, preferably by performing one or more of the following effects: (i) the transcription of the gene encoding the protein to be activated is enhanced, (ii) the translation of the mRNA encoding the protein to be activated is enhanced, (iii) the protein performs its biochemical function with enhanced efficiency in presence of the activator, and (iv) the protein performs its cellular function with enhanced efficiency in presence of the activator.

[0072] In another embodiment, the activator is a small molecule. Small molecules are compounds of natural origin or chemically synthesized compounds, preferably with a molecular weight below 10000 Da, more preferred below 1000 Da, more preferred below 500 Da and most preferred between 200 Da and 400 Da.

[0073] Preferably, the small molecule may be, for example, an organic molecule. Organic molecules relate or belong to the class of chemical compounds having a carbon basis, the carbon atoms linked together by carbon-carbon bonds. The original definition of the term organic related to the source of chemical compounds, with organic compounds being those carbon-containing compounds obtained from plant or animal or microbial sources, whereas inorganic compounds were obtained from mineral sources. Organic compounds can be natural or synthetic. Alternatively the compound may be an inorganic compound. Inorganic compounds are derived from mineral sources and include all compounds without carbon atoms (except carbon dioxide, carbon monoxide and carbonates).

[0074] The efficiency of the activator can be quantified by comparing the level of activity in the presence of the activator to that in the absence of the activator. For example, as an activity measure may be used: the change in amount of mRNA formed, the change in amount of protein formed, the change in amount of phosphorylation, and/or the change in the cellular phenotype or in the phenotype of an organism.

[0075] In a preferred embodiment, the level of activity is 10% more than the activity in absence of the activator, more preferred, the level of activity is 25% or 50% more than the activity in absence of the activator. Yet more preferred are activators enhancing the level of activity to 75%, 80%, 90% or 100% more than the activity in absence of the activator.

[0076] In accordance with the present invention, the term “pharmaceutical composition” relates to a composition for administration to a patient, preferably a human patient. The pharmaceutical composition of the invention comprises the compounds recited above. It may, optionally, comprise further molecules capable of altering the characteristics of the compounds of the invention thereby, for example, stabilizing, modulating and/or activating their function. The composition may be in solid, liquid or gaseous form and may be, inter alia, in the form of (a) powder(s), (a) tablet(s), (a) solution(s) or (an) aerosol(s). The pharmaceutical composition of the present invention may, optionally and additionally, comprise a pharmaceutically acceptable carrier. Examples of suitable pharmaceutical carriers are well known in the art and include phosphate buffered saline solutions, water, emulsions, such as oil/water emulsions, various types of wetting agents, sterile solutions, organic solvents including DMSO etc. Compositions comprising such carriers can be formulated by well known conventional methods. These pharmaceutical compositions can be administered to the subject at a suitable dose. The dosage regimen will be determined by the attending physician and clinical factors. As is well known in the medical arts, dosages for any one patient depends upon many factors, including the patient's size, body surface area, age, the particular compound to be administered, sex, time and route of administration, general health, and other drugs being administered concurrently. The therapeutically effective amount for a given situation will readily be determined by routine experimentation and is within the skills and judgement of the ordinary clinician or physician. Generally, the regimen as a regular administration of the pharmaceutical composition should be in the range of 1 μg to 5 g units per day. However, a more preferred dosage might be in the range 0.01 mg to 100 mg, even more preferably 0.01 mg to 50 mg and most preferably 0.01 mg to 10 mg per day.

[0077] In accordance with the present invention, “the extracellular domain of an Eph receptor tyrosine kinase” is defined as a protein comprising the extracellular domain of an Eph receptor tyrosine kinase, which generally comprises the first 200 amino acid residues of the N-terminus, preferably the first 300 amino acid residues, more preferably the first 400 amino acid residues, more preferably the first 530 amino acid residues, more preferably the first 590 amino acid residues and most preferably the first 600 amino acid residues.

[0078] The term “Fc chain” is defined as the region of an antibody composed of two heavy chains that each contribute two to three constant domains, depending on the class of the antibody. Fc chains bind to various cell receptors and complement proteins.

[0079] The “Eph receptor tyrosine kinase lacking the cytoplasmic tail” is defined as a protein which lacks the last 200-850 C-terminal amino acid residues, preferably the protein lacks the last 400-600 C-terminal amino acid residues, more preferably it lacks the last 450-550 amino acid residues and most preferably it lacks the last 470-520 C-terminal amino acid residues. Alternatively, said “Eph receptor tyrosine kinase lacking the cytoplasmic tail” may be defined as an Eph receptor tyrosine kinase comprising at least the extracellular portion and preferably said Eph receptor tyrosine kinase comprises at least the extracellular portion and the transmembrane region.

[0080] The term “dominant negative mutant” refers to a mutant that produces a protein that interacts with and/or interferes with the function of a wild-type protein.

[0081] In a preferred embodiment the nucleic acid molecule(s) is/are DNA.

[0082] The nucleic acid molecule may be inserted into several commercially available vectors. Non-limiting examples include vectors compatible with an expression in mammalian cells like pREP (Invitrogen), pcDNA3 (Invitrogen), pCEP4 (Invitrogen), pMC1neo (Stratagene), pXT1 (Stratagene), pSG5 (Stratagene), EBO-pSV2neo, pBPV-1, pdBPVMMTneo, pRSVgpt, pRSVneo, pSV2-dhfr, plZD35, pLXIN, pSIR (Clontech), pIRES-EGFP (Clontech), pEAK-10 (Edge Biosystems) pTriEx-Hygro (Novagen), pCINeo (Promega), Okayama-Berg cDNA expression vector pcDV1 (Pharmacia), pRc/CMV, pcDNA1, pSPORT1 (GIBCO BRL), pGEMHE (Promega), pSVL and pMSG (Pharmacia, Uppsala, Sweden), pRSVcat (ATCC 37152), pSV2dhfr (ATCC 37146) or pBC12MI (ATCC 67109).

[0083] The nucleic acid molecule referred to above may also be inserted into vectors such that a translational fusion with another nucleic acid molecule is generated. The vectors may also contain an additional expressible polynucleotide coding for one or more chaperones to facilitate correct protein folding.

[0084] For vector modification techniques, see Sambrook and Russel (2001), loc. cit. Generally, vectors can contain one or more origin of replication (ori) and inheritance systems for cloning or expression, one or more markers for selection in the host, e. g., antibiotic resistance, and one or more expression cassettes.

[0085] The coding sequences inserted in the vector can e.g. be synthesized by standard methods, or isolated from natural sources. Ligation of the coding sequences to transcriptional regulatory elements and/or to other amino acid encoding sequences can be carried out using established methods. Transcriptional regulatory elements (parts of an expression cassette) ensuring expression in eukaryotic cells are well known to those skilled in the art. These elements comprise regulatory sequences ensuring the initiation of the transcription (e. g. translation initiation codon, promoters, enhancers, and/or insulators), internal ribosomal entry sites (IRES) (Owens (2001) Proc. NatI. Acad. Sci. USA 98, 1471) and optionally poly-A signals ensuring termination of transcription and stabilization of the transcript. Additional regulatory elements may include transcriptional as well as translational enhancers, and/or naturally-associated or heterologous promoter regions. Preferably, the nucleic acid molecule is operatively linked to such expression control sequences allowing expression in eukaryotic cells. The vector may further comprise nucleotide sequences encoding secretion signals as further regulatory elements. Such sequences are well known to the person skilled in the art. Furthermore, depending on the expression system used, leader sequences capable of directing the expressed polypeptide to a cellular compartment may be added to the coding sequence of the polynucleotide of the invention. Such leader sequences are well known in the art.

[0086] Possible examples for regulatory elements ensuring the initiation of transcription comprise the cytomegalovirus (CMV) promoter, SV40-promoter, RSV-promoter (Rous sarcome virus), the lacZ promoter, the gai10 promoter, human elongation factor 1a-promoter, CMV enhancer, CaM-kinase promoter, the Autographa californica multiple nuclear polyhedrosis virus (AcMNPV) polyhedral promoter or the SV40-enhancer. Examples for further regulatory elements in prokaryotes and eukaryotic cells comprise transcription termination signals, such as SV40-poly-A site or the tk-poly-A site or the SV40, lacZ and AcMNPV polyhedral polyadenylation signals, downstream of the polynucleotide. Moreover, elements such as origin of replication, drug resistance gene, regulators (as part of an inducible promoter) may also be included. Additional elements might include enhancers, Kozak sequences and intervening sequences flanked by donor and acceptor sites for RNA splicing. Highly efficient transcription can be achieved with the early and late promoters from SV40, the long terminal repeats (LTRs) from retroviruses, e.g., RSV, HTLVI, HIVI, and the early promoter of the cytomegalovirus (CMV). However, cellular elements can also be used (e.g., the human actin promoter).

[0087] The co-transfection with a selectable marker such as dhfr, gpt, neomycin, hygromycin allows the identification and isolation of the transfected cells. The transfected nucleic acid can also be amplified to express large amounts of the encoded (poly)peptide. The DHFR (dihydrofolate reductase) marker is useful to develop cell lines that carry several hundred or even several thousand copies of the gene of interest. Another useful selection marker is the enzyme glutamine synthase (GS) (Murphy et al. (1991) Biochem J. 227, 277; Bebbington et al. (1992) Bio/Technology 10, 169). Using these markers, the mammalian cells are grown in selective medium and the cells with the highest resistance are selected. As indicated above, the expression vectors will preferably include at least one selectable marker. Such markers include dihydrofolate reductase, G418 or neomycin resistance for eukaryotic cell culture.

[0088] The nucleic acid molecules as described hereinabove may be designed for direct introduction or for introduction via liposomes, phage vectors or viral vectors (e.g. adenoviral, retroviral) into the cell. Additionally, baculoviral systems or systems based on Vaccinia Virus or Semliki Forest Virus can be used as eukaryotic expression system for the nucleic acid molecules of the invention.

[0089] Mammalian host cells that could be used include, human Hela, HEK293, H9 and Jurkat cells, mouse NIH3T3 and C127 cells, Cos 1, Cos 7 and CV1, quail QC1-3 cells, mouse L cells and Chinese hamster ovary (CHO) cells. Furthermore, also primary cells are within the scope of the present invention. Said primary cells may be derived, for example, from mammals such as mouse, rat or human.

[0090] In a preferred embodiment, the nucleic acid molecule referred to above is comprised in a cell that is comprised in a mammal.

[0091] Preferably, said mammal is a human.

[0092] In a preferred embodiment, the pharmaceutical composition further comprises an inhibitor of an Eph receptor tyrosine kinase wherein said inhibitor is selected from the group consisting of an antisense nucleic acid molecule, a miRNA, an siRNA or an shRNA binding specifically a nucleic acid encoding said Eph receptor tyrosine kinase or from the group consisting of an antibody or aptamer.

[0093] The term “inhibitor” designates a compound lowering the activity of a target molecule, preferably by performing one or more of the following effects: (i) the transcription of the gene encoding the protein to be inhibited is lowered, (ii) the translation of the mRNA encoding the protein to be inhibited is lowered, (iii) the protein performs its biochemical function with lowered efficiency in presence of the inhibitor, and (iv) the protein performs its cellular function with lowered efficiency in presence of the inhibitor.

[0094] Compounds falling in class (i) include compounds interfering with the transcriptional machinery and/or its interaction with the promoter of said gene and/or with expression control elements remote from the promoter such as enhancers. Compounds of class (ii) comprise antisense constructs and constructs for performing RNA interference (e.g. siRNA) well known in the art (see, e.g. Zamore (2001) Nat Struct Biol. 8(9), 746; Tuschl (2001) Chembiochem. 2(4), 239). Compounds of class (iii) interfere with molecular function of the protein to be inhibited, in case of Eph receptor tyrosine kinases with its enzymatic activity, in particular with the protein kinase activity. Accordingly, active site binding compounds, in particular compounds capable of binding to the active site of any protein kinase, are envisaged. More preferred are compounds specifically binding to an active site of Eph receptor tyrosine kinases. Class (iv) includes compounds which do not necessarily bind directly to Eph receptor tyrosine kinases, but still interfere with Eph receptor tyrosine kinase activity, for example by binding to and/or inhibiting the function or inhibiting expression of members of a pathway which comprises Eph receptor tyrosine kinases. These members may be either upstream or downstream of Eph receptor tyrosine kinases within said pathway.

[0095] The efficiency of the inhibitor can be quantified by comparing the level of activity in the presence of the inhibitor to that in the absence of the inhibitor. For example, as an activity measure may be used: the change in amount of mRNA formed, the change in amount of protein formed, the change in amount of phosphorylation, and/or the change in the cellular phenotype or in the phenotype of an organism.

[0096] In a preferred embodiment, the level of activity is less than 90%, more preferred less than 80%, 70%, 60% or 50% of the activity in absence of the inhibitor. Yet more preferred are inhibitors lowering the level down to less than 25%, less than 10%, less than 5% or less than 1% of the activity in absence of the inhibitor.

[0097] The addition of an inhibitor of Eph receptor tyrosine kinases may, for example, allow for the enhancement of insulin secretion since Eph receptor tyrosine kinases inhibit insulin secretion when active (see Examples 3, 7, 9 and 10). Therefore, the therapeutic window may be, for example, wider when using a combination of ephrin activators and Eph receptor tyrosine kinase inhibitors with, for example, reduced side effects as compared to the desired effect of insulin secretion.

[0098] The present invention also relates to the use of an inhibitor of Eph receptor tyrosine kinase activity for the manufacture of a pharmaceutical composition for treating diabetes wherein said inhibitor is selected from the group consisting of (a) an antibody, aptamer, or a fragment or derivative thereof binding specifically to said Eph receptor tyrosine kinase; (b) a ribozyme specifically cleaving a nucleic acid encoding the intracellular domain of said Eph receptor tyrosine kinase; (c) a protein tyrosine phosphatase for Eph receptor tyrosine kinase; (d) a reducing agent of a protein tyrosine phosphatase for Eph receptor tyrosine kinase; (e) a nucleic acid molecule encoding the protein tyrosine phosphatase of (c); (f) a vector comprising the nucleic acid molecule of (e); (g) a host comprising the vector of (f; and (h) an inhibitor of Eph receptor tyrosine kinases which competes with ATP.

[0099] The term “Ribozymes” refers to RNA molecules that act as enzymes in the absence of proteins. These RNA molecules act catalytic or autocatalytic and are capable of cleaving e.g. other RNAs at specific target sites. Selection of appropriate target sites and corresponding ribozymes can be done as described for example in Steinecke et al. ((1995) Methods in Cell Biology 50, 449).

Examples of well-characterized small self-cleaving RNAs include, but are not restricted to, the hammerhead, hairpin, hepatitis delta virus, and in vitro-selected lead-dependent ribozymes. The organization of these small catalysts is in contrast to that of larger ribozymes, such as the group I intron.
The principle of catalytic self-cleavage has become well established in the last 10 years. The hammerhead ribozymes are characterized best among the RNA molecules with ribozyme activity. Since it was shown that hammerhead structures can be integrated into heterologous RNA sequences and that ribozyme activity can thereby be transferred to these molecules, it appears that catalytic antisense sequences for almost any target sequence can be created, provided the target sequence contains a potential matching cleavage site.
The basic principle of constructing hammerhead ribozymes is as follows: An interesting region of the RNA, which contains the GUC (or CUC) triplet, is selected. Two oligonucleotide strands, each with 6 to 8 nucleotides, are taken and the catalytic hammerhead sequence is inserted between them. Molecules of this type were synthesized for numerous target sequences. They showed catalytic activity in vitro and in some cases also in vivo. The best results are usually obtained with short ribozymes and target sequences.

[0100] Said ribozyme specifically cleaves e.g. the cytoplasmic tail of a nucleic acid encoding an Eph receptor tyrosine kinase thereby causing a truncated Eph receptor tyrosine kinase which consists, for example, only of the extracellular part and the transmembrane portion. Preferably, said ribozyme cleaves at least 500 nucleotides from 3′ end, more preferably at least 1000 nucleotides and most preferably at least 2500 from the 3′ end of the nucleic acid molecule encoding said Eph receptor tyrosine kinase.

[0101] The vector and the host are defined as recited hereinabove.

[0102] The “inhibitor of Eph receptor tyrosine kinases that competes with ATP” refers to small molecules as recited above which are additionally characterized by their ability to bind to the ATP binding site of e.g. kinases and inhibit their activity by rendering this site inaccessible for ATP. Examples include, but are not limited to, staurosporine.

[0103] Inhibition of kinase activity results in the Eph receptor tyrosine kinase's inability to exert transphosphorylation which leads to a loss of Eph receptor tyrosine kinase activity.

[0104] In a preferred embodiment, the type of diabetes to be treated is type II diabetes.

[0105] The Figures show:

[0106] FIG. 1. Expression and Localization of ephrin-As and EphAs in Pancreatic Islets and MIN6 cells

(A) Model of ephrin-A and EphA bidirectional signaling between two adjacent β-cells, and exogenous activation of ephrin-A reverse signaling and EphA forward signaling by EphA5-Fc and ephrin-A5-Fc fusion proteins, respectively. Circled P represents tyrosine phosphorylation.
(B) RT-PCR products for ephrin-A1 to -A5 and EphA1 to A8, performed with mRNA isolated from mouse islets and mouse insulinoma cells (MIN6).
(C-F) Confocal images of mouse pancreas sections show an islet surrounded by exocrine pancreatic tissue. Sections were stained with (C) Anti-ephrin-A5 antibody,
(D) EphA5-Fc that binds to ephrin-As, (E) Anti-EphA5 antibody and (F) ephrin-A5-Fc that binds to EphAs. Scale bars, 50 μm.
(G-I) Confocal images of a group of MIN6 cells stained for ephrin-As and EphA5.
(G) Low magnification, (H, I) High magnification of regions in (G): (H) Contact region between two MIN6 cells with EphA-ephrin-A colocalization (white arrowhead) and (I) free surfaces of MIN6 cells with no colocalization between ephrin-As (light grey arrowheads) and EphA5 (dark grey arrowheads). Note that the anti-EphA5 antibody was directed against the C-terminus of EphA5 and could not bind to the EphA5-Fc used to stain ephrin-As.
Scale bars in G, 10 μm, in H and I, 2 μm.

[0107] FIG. 2. Ephrin-A5 is Required for Glucose-stimulated Insulin Secretion

(A) Insulin secretion from control and ephrin-A5-/- islets at 2 mM glucose (white columns) and 25 mM glucose (black columns). Secreted insulin is normalized to insulin content and total protein content. Δ, difference between basal and glucose-stimulated insulin secretion. N=3 experiments. *p<0.05. All values are means±SD.
(B) Insulin content of islets isolated from control mice and ephrin-A5-/- mice presented as % of total protein content. N=3 experiments. *p<0.05. All values are means±SD.
(C) Glucose tolerance tests of control and ephrin-A5-/- mice. N=7 mice each. *p<0.05. All values are means±SD.
(D, E) EphA5-Fc immunostaining (white) of MIN6 cells transfected with (D) control siRNA and (E) ephrin-A5 siRNA 2. Cell nuclei are stained with DAPI (grey). Scale bars, 20 μm.
(F) Insulin secretion from MIN6 cells transfected with control siRNA, ephrin-A5 siRNA 1, ephrin-A5 siRNA 2, or co-transfected with ephrin-A5 siRNA 2 and ephrin-A5 cDNA without the targeted 3′-UTR. White columns, 2 mM glucose; black columns, 25 mM glucose. Secreted insulin is normalized to insulin content and total protein content. N=6 experiments. *p<0.05. All values are means±SD.

[0108] FIG. 3. Opposite Effects of EphA5-Fc and ephrin-A5-Fc on Insulin Secretion

(A, B) Insulin secretion from (A) mouse pancreatic islets and (B) MIN6 cells treated with Fc (as control), EphA5-Fc (to activate ephrin-A reverse signaling) and ephrin-A5-Fc (to activate EphA forward signaling) at 2 mM glucose (white columns) and 25 mM glucose (black columns), normalized to insulin content and total protein content. N=3 experiments. *p<0.05. All values are means±SD.
(C) Glucose-stimulated insulin secretion from MIN6 cells at high cell density (lower left image) and low cell density (lower right image) after treatment with Fc (white columns) or EphA5-Fc (black columns). N=4 experiments. *p<0.05. All values are means±SD. Scale bars, 100 μm.
(D) Basal insulin secretion from MIN6 cells at high cell density (lower left image) and low cell density (lower right image) after treatment with Fc (white columns) or ephrin-A5-Fc (black columns). N=3 experiments. *p<0.05. All values are means±SD. Scale bars, 100 μm.
(E) Detection of tyrosine-phosphorylated EphA5 (PY) and total EphA5 in Western blots after EphA5 immunoprecipitation from lysates of MIN6 cells that were grown at high and low cell density, and kept under basal conditions for 1 h+Fc or +ephrin-A5-Fc.
(F) EphA5 tyrosine phosphorylation, relative to total EphA5 protein, is shown in a histogram for the experiment shown in (E). N=2 experiments. *p<0.05. All values are means±SD.

[0109] FIG. 4. Opposite Effects of ephrin-A Reverse Signaling and EphA Forward Signaling on Insulin Secretory Granule Fusion

(A) Model showing activation of ephrin-A reverse signaling by EphA5-Fc in a single insulin-GFP expressing mouse pancreatic β-cell. Total internal reflection—fluorescence microscopy (TIR-FM) was used to detect fusion of insulin secretory granules (SG) with the plasma membrane.
(B) Histogram showing all secretory fusion events in single β-cells detected during 16 min. treatment with 22 mM glucose in the absence (control) or presence of EphA5-Fc. Fusion events of previously docked SG (black columns) and newly recruited SG (white columns) were normalized to the area. N=5-7 cells each. *p<0.05. All values are means±SEM.
(C, D) Time-course of fusion events in single β-cells. Cells treated with 22 mM glucose, (C) in the absence or (D) presence of EphA5-Fc. Fusion events of newly recruited SG (white columns) and previously docked SG (black columns) are shown. N=5-7 cells each.
(E) Model showing activation of EphA forward signaling by ephrin-A5-Fc in a single insulin-GFP expressing mouse pancreatic β-cell. TIR-FM was used to detect fusion of SG with the plasma membrane.
(F) Histogram showing all secretory fusion events in single β-cells detected during 16 min. treatment with 22 mM glucose in the absence (control) or presence of ephrin-A5-Fc. Fusion events of previously docked SG (black columns) and newly recruited SG (white columns) were normalized to the area. N=20-21 cells each. *p<0.05. All values are means±SEM.
(G, H) Time-course of fusion events in single β-cells. Cells treated with 22 mM glucose, (G) in the absence or (H) presence of ephrin-A5-Fc. Fusion events of newly recruited SG (white columns) and previously docked SG (black columns) are shown. N=20-21 cells each.
FIG. 5. Opposite Effects of EphA5-Fc and ephrin-A5-Fc on F-actin and Rac1 Activity
(A-D) F-actin staining of MIN6 cells treated for 10 min. with (A) 2 mM glucose and Fc (control), (B) 2 mM glucose and EphA5-Fc (to activate ephrin-A reverse signaling), (C) 25 mM glucose and Fc (control), (D) 25 mM glucose and ephrin-A5-Fc (to activate EphA forward signaling). Scale bars, 20 μm.
(E) Quantification of F-actin fluorescence intensities in MIN6 cells treated for 10 min. with Fc, EphA5-Fc and ephrin-A5-Fc at 2 mM glucose (white columns) and 25 mM glucose (black columns). N=10 images of each N=3 coverslips were quantified. *p <0.05. All values are means±SD.
(F) Detection of active Rac1-GTP (upper bands) and total Rac1 (lower bands) in Western blots after Pakl-PBD pull-down from lysates of confluent MIN6 cells. Cells were treated for 10 min. with Fc, EphA5-Fc and ephrin-A5-Fc at 2 mM glucose (white columns) and 25 mM glucose (black columns).
(G) Corresponding histograms of Rac1 activity, relative to total Rac1 protein. N=3 experiments. *p<0.05. All values are means±SD.
(H) Insulin secretion from MIN6 cells transfected with empty vector, DN-Rac1 and wtRac1 after treatment with Fc, EphA5-Fc and ephrin-A5-Fc at 2 mM glucose (white columns) and 25 mM glucose (black columns). N=3 experiments. *p<0.05. All values are means±SD.

[0110] FIG. 6. Glucose-induced dephosphorylation of EphA5

(A, B) Model showing how glucose changes the outcome of EphA-ephrin-A bidirectional signaling. (A) At low glucose concentration, EphA forward signaling is active. (B) Upon glucose stimulation, EphA forward signaling is attenuated by EphA dephosphorylation, involving a protein tyrosine phosphatase (PTP) activity. (C-G) Detection of tyrosine-phosphorylated EphA5 (PY) and total EphA5 in Western blots after immunoprecipitation of EphA5 from cell lysates. The EphA5 phosphorylation level, relative to total EphA5 protein, is shown in histograms. 2 mM glucose (white columns); 25 mM glucose (black columns).
(C) Pancreatic islets treated with 2 mM glucose for 30 min., then with 25 mM glucose for 5, 10 and 30 min., followed by a switch from 25 mM to 2 mM glucose for 30 min. Islets treated with ephrin-A5-Fc (to activate EphA forward signaling) for 10 min. at 2 mM and 25 mM glucose are also shown.
(D) MIN6 cells treated with 2 mM glucose for 30 min., then with 25 mM glucose for 2, 5, 10 and 30 min., followed by a switch from 25 mM to 2 mM glucose for 30 min.
(E-G) MIN6 cells treated for 5 min. with (E) Fc (control), (F) ephrin-A5-Fc (to activate EphA forward signaling) and (G) Fc+10 μM peroxovanadate (PV) (to inhibit glucose-induced EphA5 dephosphorylation) at 2 mM and 25 mM glucose. N=2 experiments. *p<0.05. All values are means±SD.

[0111] FIG. 7. EphA Dephosphorylation is Required for Insulin Secretion

(A) Model showing that peroxovanadate (PV) blocks a PTP activity, which normally dephosphorylates EphAs at high glucose concentration. (B) Model showing that overexpression of EphA5 lacking its cytoplasmic domain (DN-EphA5) rescues inhibition of EphA forward signaling in PV-treated cells at high glucose concentration.
(C) Model showing that overexpression of wt EphA5 potentiates EphA forward signaling in PV-treated cells.
(D) Insulin secretion from mouse pancreatic islets treated with Fc in the absence or presence of 10 μM peroxovanadate (PV) at 2 mM glucose (white columns) and 25 mM glucose (black columns). Secreted insulin is normalized to insulin content and total protein content. N=3 experiments. *p<0.05. All values are means±SD.
(E) Insulin secretion from MIN6 cells transfected with an empty vector (as a control), DN-EphA5 or wt EphA5 in the absence or presence of 10 μM peroxovanadate (PV) at 2 mM glucose (white columns) and 25 mM glucose (black columns). Secreted insulin is normalized to insulin content and total protein content. N=2 experiments. *p<0.05. All values are means±SD.
(F, G) Model. (F) At low glucose concentration, interactions between EphAs and ephrin-As on adjacent β-cell plasma membranes result in EphA phosphorylation and kinase-dependent EphA forward signaling. This inhibits Rac1 activity, increases cortical F-actin and suppresses insulin secretion. (G) Upon glucose stimulation, a PTP activity dephosphorylates EphAs, and EphA -ephrin-A interactions do not lead to kinase-dependent EphA forward signaling. Instead, EphAs predominantly activate ephrin-A reverse signaling, which enhances Rac1 activity, rearranges cortical F-actin and stimulates insulin secretion.

[0112] FIG. 8. Ephrin-A5 and EphA5 Expression in the Human Pancreas: EphA5-Fc and ephrin-A5-Fc Conversely Affect Insulin Secretion from Human Pancreatic Islets

(A-F) Confocal images of human pancreas sections show an islet surrounded by exocrine pancreatic tissue. Sections are stained for (A) ephrin-A5, (B) insulin, (C) ephrin-A5 and insulin (merge), (D) EphA5, (E) insulin, (F) EphA5 and insulin (merge). Scale bars in C, 100 μm and F, 50 μm.
(G) Insulin secretion from human pancreatic islets treated with Fc (as control), EphA5-Fc (to activate ephrin-A reverse signaling) and ephrin-A5-Fc (to activate EphA forward signaling) at 2 mM glucose (white columns) and 25 mM glucose (black columns), normalized to insulin content and total protein content. N=3 experiments. *p<0.05. All values are means±SD.

[0113] FIG. 9. Ephrin-A1 and EphA7 Expression in the Mouse Pancreas: EphA7-Fc and ephrin-A1-Fc Conversely Affect Glucose-stimulated Insulin Secretion

(A, B) Confocal images of mouse pancreas sections showing an islet surrounded by exocrine tissue. Sections were stained for (A) ephrin-A1, and (B) EphA7. Scale bars, 20 μm.
(C) Insulin secretion from MIN6 cells treated with Fc (as control), EphA7-Fc (to activate ephrin-A reverse signaling) and ephrin-A1-Fc (to activate EphA forward signaling) at 2 mM glucose (white columns) and 25 mM glucose (black columns), normalized to insulin content and total protein content. N=3 experiments. *p<0.05. All values are means±SD.

[0114] FIG. 10. Segregation of EphAs and ephrin-As in Mouse Insulinoma Cells

(A, B) Confocal images of non-permeabilized MIN6 cells stained for (A) ephrin-As with EphA5-Fc, and (B) EphAs with ephrin-A5-Fc. Scale bars, 20 μm.
(C) Confocal image of permeabilized MIN6 cells stained for ephrin-As with EphA5-Fc (white) and insulin (grey). Low magnification image, scale bar, 10 μm, and high magnification images, scale bar, 2 μm.
(D) Confocal image of permeabilized MIN6 cells stained for EphAs with ephrin-A5-Fc (grey) and insulin (white). Low magnification image, scale bar, 10 μm, and high magnification images, scale bar, 2 μm.

[0115] FIG. 11. Controls for Insulin Secretion Assays

(A, B) Insulin secretion from (A) mouse pancreatic islets and (B) MIN6 cells without (w/o) or with Fc control fragment at 2 mM glucose (white columns) and 25 mM glucose (black columns). Secreted insulin is normalized to insulin content and total protein content. N=3 experiments. *p<0.05. All values are means±SD.
(C, D) Insulin content of (C) mouse pancreatic islets and (D) MIN6 cells used for the insulin secretion measurements shown in FIGS. 3A and 3B, respectively. Insulin content is presented as % of total protein content. N=3 experiments. All values are means±SD.
(E) BrdU incorporation assay in MIN6 cells treated with Fc, EphA5-Fc and ephrin-A5-Fc for 1 h. N=3 experiments. All values are means±SD.
(F) WST-1 (Water-Soluble-Tetrazolium-1) viability assay of MIN6 cells treated with Fc, EphA5-Fc and ephrin-A5-Fc for 1 h. N=3 experiments. All values are means±SD.

[0116] FIG. 12. EphA Forward Signaling Inhibits Insulin Secretion

(A, B) Model showing a possible role of the EphA5 cytoplasmic domain.
(A) Over-expression of dominant-negative EphA5 with no cytoplasmic domain (DN-EphA5) blocks EphA5 forward signaling and activates ephrin-A reverse signaling. (B)
Over-expression of full-length EphA5 (wt EphA5) activates EphA forward signaling and ephrin-A reverse signaling.
(C) Insulin secretion from MIN6 cells transfected with empty vector as control, DN-EphA5 and wt EphA5 at 2mM glucose (white columns) and 25 mM glucose (black columns). N=3 experiments. *p<0.05. All values are means±SD.

[0117] FIG. 13. Connexin-36 is Required for the EphA5-Fc Mediated Effect on Glucose-stimulated Insulin Secretion

(A, B) Connexin-36 (Cx36) staining (white) of MIN6 cells transfected with (A) control siRNA and (B) Cx36 siRNA 2. Cell nuclei were stained with DAPI (grey). Scale bars, 20 μm.
(C) Insulin secretion from MIN6 cells transfected with control siRNA, Cx36 siRNA 1, Cx36 siRNA 2, Cx36 siRNA2 and Cx36 cDNA at 2 mM glucose (white columns) and 25 mM glucose (black columns). N=3 experiments. *p<0.05. All values are means±SD.

[0118] The Examples illustrate the invention. In particular, the examples demonstrate the surprising finding that the interaction between Eph receptor tyrosine kinases and ephrins is the molecular basis for enhanced insulin secretion under glucose stimulation which forms the necessary scientific basis for the embodiments of the invention.

### Experimental Procedures

### Cell Culture and Transfection Procedure

[0119] MIN6 cells (Miyazaki et al. (1990) Endocrinol. 127, 126) at passages 37-47 were maintained as previously described (Nikolova et al. (2006) Dev. Cell 10, 397). The cells were electroporated with pEGFP, pEGFP-wtEphA5 (Gao et al. (1998) Proc. Natl. Acad. Sci. U.S.A. 95, 5329), pEGFP-DN-EphA5 (Gao et al. (1998) Proc. Natl. Acad. Sci. U.S.A. 95, 5329), pEGFP-ephrin-A5, (Wimmer-Kleikamp et al. (2004) J. Cell Biol. 164, 661), pEGFP-wtRac1, pEGFP-DN-Rac1 (Rac1N17) (Hall (2005) Biochem. Soc. Trans. 33, 891) and pcDNA-Cx36 constructs (Ravier et al. (2005) Diabetes 54, 1798); siRNA against firefly luciferase (control siRNA), ephrin-A5 and Cx36 by using Amaxa nucleofection (Amaxa biosystems).

### Mouse Models, Pancreatic Islet Culture and Glucose Tolerance Test

[0120] Pancreatic islets were isolated from NMRI mice for all experiments, except for the experiments with male ephrin-A5-/- and control littermates, which were C57BL/6 (Knoll et al. (2001) Development 128, 895). All mice used were 8-10 weeks old. Human pancreatic islets were isolated from a perfused human pancreas by using a protocol approved by the Ethical Research Committee of the Technical University Medical School Dresden and according to the law of the State of Saxony. Mouse and human islets were cultured overnight in Dulbecco's modified Eagle's medium (DMEM) containing 11 mM glucose (Gibco), supplemented with 10% heat inactivated fetal calf serum (FCS), 100U/ml Penicillin, 100 μg/ml Streptomycin, 1.5 g/L NaHCO₃ in a humidified atmosphere (5% CO₂, 37° C.). The glucose tolerance test was performed as previously described (Lammert et al. (2003) Curr. Biol. 13, 1070).

RT-PCR, siRNA Syntheses and Real-time RT-PCR

[0121] Total RNA was extracted from MIN6 cells and mouse pancreatic islets by using RNeasy Mini kit (Qiagen) and transcribed into cDNA, which was used for RT-PCR. All Ephs and ephrins primers were initially tested on cDNA isolated from different mouse embryonic and adult organs as positive controls.

Small interfering RNA against the 3′-UTR of ephrin-A5 and Cx36 was prepared as previously described (Nikolova et al. (2006) Dev. Cell 10, 397). Ephrin-A5 and Cx36 knockdown efficiencies were monitored at the mRNA level using real-time RT-PCR (data not shown) and immunocytochemistry.
Insulin Secretion from Pancreatic Islets and MIN6 Cells

[0122] For insulin secretion measurements, islets or MIN6 cells were starved for 1 h in Krebs Ringer Buffer (KRB) containing 115 mM NaCl, 5 mM KCl, 1.2 mM KH₂PO₄, 1 mM MgSO₄, 2.5 mM CaCl₂, 24 mM NaHCO₃, 2 mM glucose, 25 mM HEPES (pH 7.4), and 0.1% bovine serum albumin. After starvation, medium was exchanged for the same buffer +/− Fc fusion proteins to measure basal secretion, or for KRB containing 25 mM glucose +/− Fc fusion proteins to measure glucose-stimulated insulin secretion, during 1 h incubation. When Fc fusion proteins were used, islets were continuously shaken (300-500 rpm) to facilitate access of Fc fusion proteins to islet β-cells. The amount of secreted insulin was measured in the medium, and islets or MIN6 cells were subsequently dissolved in RIPA buffer to measure insulin content and total protein content. Secreted insulin was normalized to total insulin content and total protein content, and presented as % of basal control insulin secretion. In all histograms, the first column represents the basal control (=100%), except in FIG. 3C, in which the third column is taken as basal control. Secreted insulin and insulin content were measured by using ultra-sensitive rat insulin ELISA kit (Crystal Chem inc.). The total protein content was measured using BCA kit (Molecular Probes). Fc fusion proteins (R&D systems) and peroxovanadate (Sigma) were used at concentrations of 4 μg/ml and 10 μM, respectively. For determining viability and proliferation of islets and MIN6 cells during 1 h insulin secretion assay, a water-soluble tetrazolium (WST-1) reagent (Roche) and BrdU ELISA assay (Roche) were used, respectively.

### Confocal Light Microscopy and TIR-FM

[0123] Adult mouse pancreata, MIN6 cells and a biopsy of human pancreas were fixed in 4% PFA. After stepwise sucrose infiltration (9, 18, and 30%), the pancreatic tissues were embedded in O.C.T., deep frozen, and cut in 10 μm thick cryosections. 1:100-diluted rabbit-anti-EphA5, rabbit-anti-EphA7, rabbit-anti-ephrin-A1 (Santa Cruz), goat-anti-ephrin-A5 (R&D systems), guinea pig-anti-insulin (DAKO), rabbit anti-connexin-36 antibodies and 4 μg/ml Fc fusion proteins (R&D systems) were used for staining. 1:500-diluted secondary antibodies were used, conjugated with AlexaFluor488 (Molecular Probes) and with Cy5 (Dianova). 1 μg/ml DAPI (Sigma) was used to stain cell nuclei. Monolayers of MIN6 cells were treated for 10 min. with or without Fc fusion proteins at 2 mM or 25 mM glucose, fixed and stained with 1:500-diluted phalloidin-rhodamine (Molecular Probes). Confocal images were acquired by using a Zeiss confocal microscope and intensities were quantified by using ImageJ software (NIH).

[0124] The Olympus total internal reflection-fluorescence microscope (TIR-FM) was used with a high-aperture objective lens (Apo 100x OHR; NA 1.65, Olympus) (Ohara-Imaizumi et al. (2004) Biochem. J. 381, 13). To monitor single insulin granules, adenovirus (insulin-GFP) infected primary mouse β-cells on high-refractive-index glass were mounted in an open chamber and incubated for 60 min at 37° C. in KRB containing 2.2 mM glucose (starvation). Cells were pre-incubated for 15 min. +/− Fc fusion proteins under basal conditions, transferred to a thermostat-controlled stage (37° C.) and stimulated with glucose by the addition of 22 mM glucose-KRB +/− 4 μg/ml EphA5-Fc or ephrin-A5-Fc. Images were acquired every 300 ms, and images were analyzed by using Metamorph software (Molecular Devices).

### Immunoprecipitation and Western Blot

[0125] MIN6 cells and pancreatic islets were lysed in RIPA buffer, supplemented with protease and phosphatase inhibitors. 1 μg total protein, isolated from MIN6 cell lysates or 500 ng total protein, isolated from islet lysates, were used for immunoprecipitation with 1:1,000-diluted rabbit-anti-EphA5 (Santa Cruz) and protein-A beads (Amersham). For immunoprecipitation/pull-down of Rac1-GTP with Pak1-PBD (P21-activated kinase-1-P21 Binding Domain) and Westem blots, a Rac1 Activation StressXPress Kit (Biomol) was used. The immunoprecipitates were separated on 4-12% gradient SDS-polyacrylamide gels (Invitrogen) and transferred onto a PVDF membrane (Amersham). For western blots, 1:500-diluted rabbit-anti-EphA5 antibody (Santa Cruz), 1:1,000-diluted mouse-anti-PY antibody (Biomol) and 1:200-diluted rabbit-anti-Rac1 antibody (Santa Cruz) were used. 1:10,000-diluted HRP-conjugated donkey-anti-rabbit antibody (Dianova) and 1:5,000-diluted HRP-conjugated goat-anti-mouse antibody (Dianova) were used as secondary antibodies. Western blots were developed using an ECL system (Amersham). The intensities of EphA5 and Rac1 bands were normalized to the intensities of total EphA5 and Rac1, respectively, and presented as % of basal control. The intensities of the bands were quantified by using TotalLab software (Stratagene).

### Statistical Analysis

[0126] All values are means±SD. Statistical significance was determined by using the two-tailed unpaired Student's t-test, and differences were considered to be statistically significant when p<0.05.

TABLE 2

Primer sequences (5′ to 3′) used for RT-PCR and siRNA production

| SEQ. | | | |
|---|---|---|---|
| ID | | | |
| NO | type | Name | DNA |
| 117 | artificial | ephrin- | TTCAAATCCCAAGTTGCGTGAG |
| | | A1f | |
| 118 | artificial | ephrin- | AACTGTTCACCCCCTTTTCCC |
| | | A2f | |
| 119 | artificial | ephrin- | TACATCTCCACGCCCACTCACAAC |
| | | A3f | |
| 120 | artificial | ephrin- | CGATGCCTTTTGCCCCTTTC |
| | | A4f | |
| 121 | artificial | ephrin- | AACAGCAGCAACCCCAGATTC |
| | | A5f | |
| 122 | artificial | EphA1f | GCCTTACGCCAACTACACATTTACC |
| 123 | artificial | EphA2f | TGAGGATGTCCGTTTTTCCAAG |
| 124 | artificial | EphA3f | GCAATGCTGGGTATGAAGAACG |
| 125 | artificial | EphA4f | GAACAACTGGCTGCGAACTGAC |
| 126 | artificial | EphA5f | GCAAGTATTATGGGGCAGTTCG |
| 127 | artificial | EphA6f | TCCTCTTTGGTTGAAGTGCGGG |
| 128 | artificial | EphA7f | AGCAGTCTCCAGTGAACAGAATCC |
| 129 | artificial | EphA8f | TCCATCAACGAGGTAGACGAGTCC |
| 130 | artificial | ephrin- | CAGCAGCAGTGGTAGGAGCAATAC |
| | | A1r | |
| 131 | artificial | ephrin- | CTCATTGGTTGGACGCACATAAAC |
| | | A2r | |
| 132 | artificial | ephrin- | TCCCTCAAAGTCTTCCAACACG |
| | | A3r | |
| 133 | artificial | ephrin- | ATGTGATGACCCGCTCTCCTTG |
| | | A4r | |
| 134 | artificial | ephrin- | AAGCATCGCCAGGAGGAACAGTAG |
| | | A5r | |
| 135 | artificial | EphA1r | GTCCACATAGGGTTTTAGCCACAG |
| 136 | artificial | EphA2r | TGCTGTTGACGAGGATGTTGCG |
| 137 | artificial | EphA3r | TAGTTGTGATGCTGACTGCGGC |
| 138 | artificial | EphA4r | TTCAGCATTCTGCTCCTCGTGC |
| 139 | artificial | EphA5r | ATAGAGAGCAGCAGGGCAATCC |
| 140 | artificial | EphA6r | CAGTGTGTCTTGGGATGAAGCG |
| 141 | artificial | EphA7r | ATCCCAGCGGCAATACCTCTCAAC |
| 142 | artificial | EphA8r | GGGGCACTTCTTGTAGTAGATTCG |
| 143 | artificial | ephrin- | ATTAATACGACTCACTATAGGCAAGCCAGGGTTGATGAGTAG |
| | | A5 | |
| | | siRNA 1f | |
| 144 | artificial | ephrin- | ATTAATACGACTCACTATAGGAGCTGATTGCCAGGAAACAC |
| | | A5 | |
| | | siRNA 2f | |
| 145 | artificial | ephrin- | CGTAATACGACTCACTATAGGTCACAAGTTTAAATAGGACAAGCA |
| | | A5 | |
| | | siRNA 1r | |
| 146 | artificial | ephrin- | CGTAATACGACTCACTATAGGAAATGTTGGGTGCCTTCTGT |
| | | A5 | |
| | | siRNA 2r | |
| 147 | artificial | ephrin- | TGTTGACGCTGCTCTTTCTGGTG |
| | | A5f | |
| 148 | artificial | a- | CTTTGAGCCAGCCAACCAGAT |
| | | tubulinf | |
| 149 | artificial | ephrin- | AATCTGGGGTTGCTGCTGTTCC |
| | | A5r | |
| 150 | artificial | a- | TTGATGGTGGCAATGGCAG |
| | | tubulinr | |
| 151 | artificial | Cx36 | ATTAATACGACTCACTATAGGAGGGCAGGTTTGGGGAAG |
| | | siRNA 1f | |
| 152 | artificial | Cx36 | ATTAATACGACTCACTATAGGGCATGCCAGCTTTTCTTTTT |
| | | siRNA 2f | |
| 153 | artificial | Cx36 | CGTAATACGACTCACTATAGGGGCCAGATGAAGGAAAAAGA |
| | | siRNA 1r | |
| 154 | artificial | Cx36 | CGTAATACGACTCACTATAGGCGGGCTGATTAAGGTCTCTG |
| | | siRNA 2r | |
| 155 | artificial | Cx36f | ACGGTGTACGATGATGAGCA |
| 156 | artificial | Cx36r | GTAGAGTACCGGCGTTCTCG |

### EXAMPLE 1

### Ephrin-A and EphA Expression in Mouse and Human Pancreatic Islets

[0127] We investigated the presence of Ephs and ephrins in pancreatic islets as possible candidate molecules involved in cell-cell communication (FIG. 1A). First, we studied the transcriptional profiles of Ephs and ephrins in mouse islets and mouse insulinoma cells, MIN6 (FIG. 1B). We detected similar transcription of ephrin-As and EphAs in islets and MIN6 cells (FIG. 1B). We also detected expression of ephrin-Bs and EphBs (data not shown), but focused on ephrin-As and EphAs due to their strong abundance and similar expression in both islets and MIN6 cells. Immunostaining mouse pancreas sections showed co-expression of ephrin-A5 and EphA5 proteins in islets, and this expression was stronger in the islets than in the surrounding exocrine tissue (FIGS. 1C and 1E). A similar expression was observed in the human pancreas (FIG. 8A-8F). Other ephrin-As and EphAs, such as ephrin-A1 and EphA7, were also expressed in mouse pancreatic islets (FIGS. 9A and 9B). Next we stained mouse pancreas sections with EphA5-Fc and ephrin-A5-Fc fusion proteins, which bind with different affinity to virtually all ephrin-As and EphAs, respectively (FIG. 1A) (Flanagan and Vanderhaeghen (1998) Annu. Rev. Neurosci. 21, 309). The staining showed that islet ephrin-As bind to EphA5 (FIG. 1D) and that islet EphAs bind to ephrin-A5 (FIG. 1F).

[0128] EphA5 and ephrin-As co-localized in regions where MIN6 cells were in contact with each other (FIGS. 1G and 1H). In line with the findings that EphAs and ephrin-As segregate in motor neurons (Marquardt et al. (2005) Cell 121, 127), and that several transmembrane proteins also segregate in insulinoma cells (Ohara-Imaizumi et al. (2004) J. Biol. Chem. 279, 8403; Uhles et al. (2003) J. Cell Biol. 163, 1327), we observed little co-localization of EphAS and ephrin-As on the free surfaces of MIN6 cells (FIG. 11). Moreover, based on the EphA5-Fc and ephrin-A5-Fc staining of non-permeabilized MIN6 cells, we found that ephrin-As were more strongly localized to the plasma membrane compared to the EphAs (FIGS. 10A and 10B). Conversely, EphAs strongly localized to insulin secretory granules (FIG. 10D), whereas ephrin-As did not (FIG. 10C).

[0129] These results show that EphAs and ephrin-As are co-expressed in β-cells, and suggest that EphA-ephrin-A bidirectional signaling may take place between adjacent β-cells (FIG. 1A).

### EXAMPLE 2

### Ephrin-A5 is Required for Glucose-stimulated Insulin Secretion

[0130] To investigate whether ephrin-A5, a possible participant in bidirectional signaling between β-cells, was required for insulin secretion, we compared control islets with ephrin-A5 deficient islets (ephrin-A5-/-) (FIG. 2A-2C). In comparison with control islets, ephrin-A5-/- islets had a significantly reduced glucose-stimulated insulin secretion (compare black columns in FIG. 2A). These results show that ephrin-A5 is required for normal β-cell insulin secretory response to glucose (compare Δs in FIG. 2A). In contrast, we did not detect any differences in the insulin content between control and ephrin-A5-/- islets (FIG. 2B), thus excluding an effect of ephrin-A5 on insulin production. In line with the insulin secretion defects observed in ephrin-A5-/- mouse islets (FIG. 2A), we also detected impaired glucose tolerance in the ephrin-A5 deficient mice (FIG. 2C).

[0131] To rule out the possibility that the observed defects were due to changes in non-β-cells, which are also present in islets, we knocked down ephrin-A5 in MIN6 cells (FIG. 2D and 2E), a frequently used model for β-cells (Miyazaki et al. (1990) Endocrinol. 127, 126). We noticed that ephrin-A5 knockdown led to significantly increased basal insulin secretion (white columns in FIG. 2F), as well as significantly reduced glucose-stimulated insulin secretion (black columns in FIG. 2F). In addition, we could reproduce this effect with a second set of siRNA molecules. To provide evidence for the specificity of the knockdown, we rescued the insulin secretory response to glucose by cotransfecting cells with an ephrin-A5 cDNA, which lacked the 3′-UTR targeted by the siRNA (FIG. 2F). These results show that ephrin-A5 is involved in suppression of basal insulin secretion and is required for glucose-stimulated insulin secretion.

### EXAMPLE 3

### Opposite Effects of EphA5-Fc and ephrin-A5-Fc on Insulin Secretion

[0132] Communication between β-cells was shown to inhibit insulin secretion at low glucose concentrations, but stimulate insulin secretion at high glucose concentrations, and our data suggest that ephrin-A5 is involved in these communication effects. To uncover the underlying molecular mechanism, we first investigated the effects of ephrin-A reverse signaling, and EphA forward signaling, on insulin secretion (FIG. 3). We used EphA5-Fc to stimulate ephrin-A reverse signaling, and ephrin-A5-Fc to stimulate EphA forward signaling (FIGS. 3A and 3B). However, it is worth noting that EphA5-Fc and ephrin-A5-Fc fusion proteins may also interfere with endogenous EphA forward signaling and ephrin-A reverse signaling, respectively, when β-cells interact with each other.

[0133] Because ephrin-As and EphAs are promiscuous (Flanagan and Vanderhaeghen (1998) Annu. Rev. Neurosci. 21, 309), the EphA5-Fc and ephrin-A5-Fc fusion proteins allowed us to manipulate virtually all relevant ephrin-As and EphAs in β-cells, respectively. We first confirmed that control Fc fragments did not affect insulin secretion from either pancreatic islets or MIN6 cells (FIGS. 11A and 11B). We then showed that EphA5-Fc significantly increased basal and glucose-stimulated insulin secretion (compare EphA5-Fc with Fc in FIG. 3A), whereas ephrin-A5-Fc significantly decreased glucose-stimulated insulin secretion from pancreatic islets (compare ephrin-A5-Fc with Fc in FIG. 3A).

[0134] Islets consist mainly of β-cells, but also harbor other cell types, such as α-cells and endothelial cells that might have been affected in these experiments. Therefore, we tested the role of ephrin-A reverse signaling and EphA forward signaling in MIN6 cells (FIG. 3B), and obtained similar results: EphA5-Fc increased basal and glucose-stimulated insulin secretion (compare EphA5-Fc with Fc in FIG. 3B), whereas ephrin-A5-Fc decreased glucose-stimulated insulin secretion (compare ephrin-A5-Fc with Fc in FIG. 3B). Moreover, EphA7-Fc and ephrin-A1-Fc had similar effects on glucose-stimulated insulin secretion (FIG. 9C).

[0135] The effects on insulin secretion did not result from any changes in insulin content, cell division or cell viability during the 1-hour incubation time with EphA5-Fc and ephrin-A5-Fc (FIGS. 11C-11F). In addition, we also showed in human islets that EphA5-Fc strongly increased basal and glucose-stimulated insulin secretion, whereas ephrin-A5-Fc suppressed glucose-stimulated insulin secretion (FIG. 8G). These results therefore demonstrate that EphA5-Fc and ephrin-A5-Fc effectively and conversely change insulin secretion from mouse and human pancreatic islets.

### EXAMPLE 4

### EphA5-Fc Partially Rescues Glucose-stimulated Insulin Secretion in Cells with Reduced Cell-cell Contact

[0136] Glucose-stimulated insulin secretion is decreased in situations of reduced β-cell communication. Therefore we asked whether EphA5-Fc restored glucose-stimulated insulin secretion in non-confluent MIN6 cells (FIG. 3C). We first showed that non-confluent cells (“Low cell density”) had lower glucose-stimulated insulin secretion compared to confluent cells (“High cell density”) (compare white columns in FIG. 3C). We then showed that EphA5-Fc partially restored glucose-stimulated insulin secretion in non-confluent cells (compare last two columns in FIG. 3C). These results suggest that endogenous ephrin-A reverse signaling enhances glucose-stimulated insulin secretion.

### EXAMPLE 5

### Ephrin-A5-Fc Fully Rescues Suppression of Basal Insulin Secretion in Cells with Reduced Cell-cell Contact

[0137] In the experiments with islets, as well as confluent MIN6 cell monolayers, we noticed that ephrin-A5-Fc reduced glucose-stimulated insulin secretion, but did not suppress basal insulin secretion (FIGS. 3A and 3B). We hypothesized that basal insulin secretion already was maximally suppressed by endogenous EphA-ephrin-A interactions and, therefore, we could not further decrease basal insulin secretion by using ephrin-A5-Fc. If this were the case, one would expect that ephrin-A5-Fc was capable of decreasing basal insulin secretion, when the extent of endogenous EphA-ephrin-A interactions was less. Thus, we performed the experiments with non-confluent MIN6 cells; which had lower levels of endogenous EphA forward signaling as a result of less cell-cell contact.

[0138] As shown in FIG. 3D, non-confluent MIN6 cells had significantly enhanced basal insulin secretion (compare white columns). In support of the hypothesis that this was due to reduced endogenous EphA forward signaling, we observed that EphA5 phosphorylation levels were lower in non-confluent MIN6 cells compared to confluent cells (FIG. 3E; compare white columns in FIG. 3F). Importantly, ephrin-A5-Fc decreased basal insulin secretion in non-confluent cells to a level characteristic of confluent MIN6 cells (compare last two columns in FIG. 3D). Consistent with the idea that this was due to exogenous activation of EphA forward signaling, EphA5 phosphorylation levels were significantly increased upon ephrin-A5-Fc treatment of non-confluent MIN6 cells (FIG. 3E; compare last two columns in FIG. 3F). Ephrin-A5-Fc treatment even induced a stronger EphA5 phosphorylation in non-confluent MIN6 cells than in confluent ones (FIG. 3F), possibly due to increased fusion of insulin secretory granules, which carry EphAs to the plasma membrane, where they can bind to ephrin-A5-Fc. These results suggest that endogenous EphA forward signaling inhibits basal insulin secretion.

### EXAMPLE 6

### Ephrin-A Reverse Signaling Stimulates Insulin Secretion

[0139] The previous experiments strongly suggested that ephrin-A reverse signaling enhanced insulin secretion (FIG. 3). Here we used single primary β-cells to stimulate ephrin-A reverse signaling with EphA5-Fc, without simultaneously affecting endogenous EphA forward signaling (FIG. 4A). This was possible because the cells did not contact each other and, therefore, their ephrin-As could not interact with the EphAs of any adjacent cells (FIG. 4A).

[0140] We expressed GFP-tagged insulin in primary mouse β-cells and stimulated these cells with glucose, in the presence or absence of EphA5-Fc (FIG. 4A). We then monitored the secretory events in single β-cells by using total internal reflection-fluorescence microscopy (TIR-FM). Time-lapse TIR-FM allowed us to discriminate between fusion events of previously docked and newly recruited insulin secretory granules (Ohara-Imaizumi et al. (2004) Biochem. J. 381, 13). As shown in FIG. 4B, EphA5-Fc treatment significantly increased fusion events of newly recruited insulin secretory granules (white columns).

[0141] Glucose-stimulated insulin secretion, in response to a sudden increase in glucose concentration, follows a biphasic time course consisting of a rapid 1^{st} phase followed by a sustained 2^{nd} phase (Rorsman and Renstrom (2003) Diabetologia 46, 1029). We found that EphA5-Fc increased the number of secretory events during both phases of insulin secretion with a stronger effect on the 2^{nd} phase (compare FIGS. 4C and 4D). We conclude from these experiments that ephrin-A reverse signaling stimulates insulin secretion.

### EXAMPLE 7

### EphA Forward Signaling Suppresses Insulin Secretion

[0142] The experiments, shown in FIG. 3, strongly suggested that EphA forward signaling suppressed insulin secretion. Here we used TIR-FM of single ephrin-A5-Fc treated β-cells to provide evidence of a suppressive effect of EphA forward signaling (FIG. 4E). As shown in FIG. 4F, ephrin-A5-Fc treatment significantly reduced the number of fusion events of newly recruited insulin secretory granules (white columns). In addition, ephrin-A5-Fc reduced the number of secretory events during both phases of insulin secretion with a stronger effect on the 2^{nd} phase (compare FIGS. 4G and 4H). As additional evidence of an inhibitory effect of EphA forward signaling on insulin secretion, a dominant-negative EphA5 protein (DN-EphA5), lacking its cytoplasmic domain, was expressed in MIN6 cells (FIG. 12A). This DN-EphA5 binds to ephrin-As and this binding is expected to induce ephrin-A reverse signaling, but not EphA forward signaling. In contrast, over-expression of a full-length EphA5 protein (wt EphA5) is expected to induce ephrin-A reverse signaling, and also EphA forward signaling (FIG. 12B). In support of an inhibitory effect of EphA forward signaling, we found that DN-EphA5 increased basal and glucose-stimulated insulin secretion, whereas wt EphA5 over-expression decreased glucose-stimulated insulin secretion in confluent MIN6 cell monolayers (FIG. 12C). We conclude that EphA forward signaling suppresses insulin secretion.

### EXAMPLE 8

### Downstream Targets of EphA-ephrin-A Signaling and Their Impact on Insulin Secretion

[0143] It has been shown that destabilization of F-actin enhances insulin secretion, whereas its stabilization inhibits insulin secretion (Tomas et al. (2006) J. Cell Sci. 119, 2156). This led to the hypothesis that dense cortical F-actin network limits access of insulin secretory granules to the plasma membrane. However, since complete F-actin depolymerization inhibits glucose-stimulated insulin secretion (Li et al. (1994) Mol. Biol. Cell 5, 1199), certain actin filaments appear to be required for the secretory process.

[0144] Because ephrin-A reverse signaling, and EphA forward signaling, were shown to rearrange F-actin in several cell types (Marquardt et al. (2005) Cell 121, 127), we tested whether EphA5-Fc and ephrin-A5-Fc also changed the F-actin state of mouse insulinoma cells (FIG. 5A-5E). We found that EphA5-Fc resulted in F-actin rearrangements with a subtle decrease in F-actin intensity under basal conditions (compare FIGS. 5A and 5B), consistent with its stimulatory effect on insulin secretion. In contrast, ephrin-A5-Fc strongly increased F-actin polymerization under basal and stimulatory conditions (compare FIGS. 5C and 5D), consistent with its inhibitory effect on insulin secretion.

[0145] EphAs modulate activity of Rac1, a Rho-GTPase involved in F-actin remodeling and endocytosis (Murai and Pasquale (2005) Neuron 46, 161). Since Rac1 is also involved in glucose-stimulated insulin secretion (Kowluru and Veluthakal (2005) Diabetes 54, 3523; Li et al. (2004) Am. J. Physiol. Endocrinol. Metab. 286, E818), we investigated whether EphA5-Fc and ephrin-A5-Fc modulated Rac1 activity in MIN6 cells. In line with previous reports (Kowluru and Veluthakal (2005) Diabetes 54, 3523; Li et al. (2004) Am. J. Physiol. Endocrinol. Metab. 286, E818), glucose-stimulation significantly enhanced Rac1 activity (Fc, FIGS. 5F and 5G). Consistent with its stimulatory effects on insulin secretion, we found that EphA5-Fc stimulated Rac1 activity under basal and stimulatory conditions (compare Fc with EphA5-Fc in FIG. 5G). In contrast, ephrin-A5-Fc inhibited Rac1 activity in confluent MIN6 cells under stimulatory conditions, consistent with its inhibitory effect on insulin secretion (compare Fc with ephrin-A5-Fc in FIG. 5G). In addition, EphA5-Fc and ephrin-A5-Fc required Rac1 activity for their effects on glucose-stimulated insulin secretion (compare DN-Rac1 with empty vector in FIG. 5H). These results suggest that EphA5-Fc and ephrin-A5-Fc modulate glucose-stimulated insulin secretion by affecting Rac1 activity and F-actin in β-cells.

[0146] Since Eph-ephrin signaling was also shown to affect connexin localization and gap junction communication (Mellitzer et al. (1999) Nature 400: 77; Davy et al. (2006) PLOS Biol. 4: 1763), we investigated whether connexin-36, the gap junction protein of β-cells (Ravier et al. (2005) Diabetes 54: 1798), was required for the effects of Eph-ephrin signaling on insulin secretion (FIG. 13). We showed that the stimulatory effect of EphA5-Fc on basal and glucose-stimulated insulin secretion required connexin-36 (compare Fc with EphA5-Fc in FIG. 13C), whereas the inhibitory effect of ephrin-A5-Fc did not (compare Fc with ephrin-A5-Fc in FIG. 13F).

[0147] Taken together, these results show that EphA-ephrin-A signaling affects several β-cell components required for regulating insulin secretion: F-actin, Rac1 and connexin-36.

### EXAMPLE 9

### Glucose-induced Dephosphorylation of EphA5

[0148] EphAs are receptor tyrosine kinases (RTKs) that oligomerize upon ephrin-A binding (Kullander and Klein (2002) Nat. Rev. Mol. Cell Biol. 3, 475). The oligomerization brings the cytoplasmic EphA RTK domains in close proximity to each other, thereby allowing their trans-phosphorylation, which promotes EphA forward signaling. The level of kinase-dependent EphA forward signaling can therefore be determined by measuring the levels of EphA tyrosine phosphorylation. Here we investigated the hypothesis that EphA forward signaling was active at low glucose concentrations in order to suppress insulin secretion (FIG. 6A). We also investigated whether, upon glucose stimulation, EphA forward signaling was downregulated by dephosphorylation (FIG. 6B), thus allowing predominance of ephrin-A reverse signaling, which stimulated insulin secretion.

[0149] In support of this hypothesis, we found that the EphA5 phosphorylation levels were higher at a low glucose concentration (2 mM) compared to all depicted time points after glucose stimulation (25 mM) in both islets and MIN6 cells (FIGS. 6C and 6D). In islets, the presence of phosphorylated EphA5 decreased shortly after glucose stimulation (compare column 1 with columns 2 to 4 in FIG. 6C). However, when the islets were brought back to low glucose concentration, EphA5 phosphorylation reached basal levels again (compare column 1 with column 5 in FIG. 6C). The level of EphA5 phosphorylation was easier to determine in MIN6 cells, because these cells were not mixed with non-β-cells and could be obtained in large quantities (FIG. 6D). As with islets, the amount of phosphorylated EphA5 decreased shortly after glucose stimulation (compare column 1 with columns 2 to 5 in FIG. 6D). At the 5^{th} minute, EphA5 phosphorylation was reduced to about 20% of basal levels (compare column 1 with column 3 in FIG. 6D). Similar to the islets, bringing back glucose-stimulated MIN6 cells to a low glucose concentration fully restored basal EphA5 phosphorylation levels (compare last column with first column in FIG. 6D). To demonstrate that EphA5 was not the only EphA to be dephosphorylated in β-cells, we performed experiments with other members of the EphA family and observed a similar dephosphorylation upon glucose stimulation (data not shown).

[0150] Since ephrin-A5-Fc inhibited insulin secretion, we tested whether this effect correlated with the phosphorylation levels of EphA5. We noticed that treatment of islets with ephrin-A5-Fc resulted in elevated EphA5 phosphorylation under stimulatory conditions (compare column 3 with last column in FIG. 6C). In addition, ephrin-A5-Fc treatment of non-confluent MIN6 cells significantly increased EphA5 phosphorylation also under basal conditions (FIGS. 3E and 3F; FIGS. 6E and 6F). Thus, EphA5 phosphorylation levels correlate with inhibition of insulin secretion.

[0151] We then tested whether a protein tyrosine phosphatase (PTP) was involved in dephosphorylating EphAs in response to glucose stimulation (FIG. 6B). We observed that 10 μM peroxovanadate (PV), a PTP inhibitor, effectively prevented glucose-induced EphA5 dephosphorylation (FIG. 6G), and even increased EphA5 phosphorylation levels at stimulatory conditions above the levels characteristic of basal conditions (compare columns in FIGS. 6E and 6G). These results therefore suggest that EphA forward signaling is active at low glucose concentrations in order to inhibit insulin secretion (FIG. 6A), and that EphA forward signaling is downregulated by dephosphorylation, upon glucose stimulation (FIG. 6B).

### EXAMPLE 10

### EphA5 Dephosphorylation is Required for Glucose-stimulated Insulin Secretion

[0152] It was previously shown that treatment of islets with 10 μM PV strongly reduced glucose-stimulated insulin secretion (Gogg et al. (2001) Biochem. Biophys. Res. Commun. 280, 1161). Based on our experiments, we hypothesized that PV inhibited glucose-stimulated insulin secretion partially by preventing glucose-induced EphA dephosphorylation (FIG. 7A). After confirming that 10 μM PV reduced glucose-stimulated insulin secretion (FIGS. 7D and 7E), we tested whether insulin secretion could be rescued in PV-treated MIN6 cells by overexpression of DN-EphA5 (FIG. 7B). We also tested whether insulin secretion could be further reduced in PV-treated MIN6 cells by overexpression of wt EphA5 (FIG. 7C). We found that DN-EphA5 partially rescued glucose-stimulated insulin secretion in PV-treated MIN6 cells (compare Empty vector/PV with DN-EphA5/PV in FIG. 7E). In contrast, wt EphA5 reduced glucose-stimulated insulin secretion in PV-treated MIN6 cells even further (compare empty vector/PV with wt EphA5/PV in FIG. 7E). We conclude that downregulation of EphA forward signaling is essential for glucose-stimulated insulin secretion.

1. A method of identifying a compound suitable as a lead compound and/or as a medicament for the treatment and/or prevention of diabetes, the method comprising the steps of
(a) contacting a test compound with a cell comprising a protein, wherein said protein
(i) comprises or consists of the amino acid sequence of any one of SEQ ID NOs: 1 to 29;
(ii) is encoded by a nucleic acid molecule comprising or consisting of the sequence of any one of SEQ ID NOs: 59 to 87;
(iii) is a fragment of the protein according to (i) or (ii) and exhibits Eph-Receptor-Tyrosine-Kinase activity; or
(iv) has a sequence at least 75% identical with the protein according to (i) or (ii) or with the fragment according to (iii) and exhibits Eph-Receptor-Tyrosine-Kinase activity; and
(b) determining whether said test compound, upon contacting in step (a) inhibits the Eph receptor tyrosine kinase activity of said protein wherein said inhibition indicates a compound suitable as a lead compound and/or as a medicament for the treatment and/or prevention of diabetes.

2. A method of identifying a compound suitable as a lead compound and/or as a medicament for the treatment and/or prevention of diabetes, the method comprising the steps of
(a) contacting a test compound with a protein, wherein said protein
(i) comprises or consists of the amino acid sequence of any one of SEQ ID NOs: 1 to 29, or
(ii) is encoded by a nucleic acid molecule comprising or consisting of the sequence of any one of SEQ ID NOs: 59 to 87, or
(iii) is a fragment of the protein according to (i) or (ii) and exhibits Eph-Receptor-Tyrosine-Kinase activity, or
(iv) has a sequence at least 75% identical with the protein according to (i) or (ii) or with the fragment according to (iii) and exhibits Eph-Receptor-Tyrosine-Kinase activity; and
(b) determining whether said test compound, upon contacting in step (a) inhibits the Eph receptor tyrosine kinase activity of said protein wherein said inhibition indicates a compound suitable as a lead compound and/or as a medicament for the treatment and/or prevention of diabetes.

3. A method of identifying a compound suitable as a lead compound and/or as a medicament for the treatment and/or prevention of diabetes, the method comprising the steps of
(a) contacting a test compound with a cell comprising a protein, wherein said protein
(i) comprises or consists of the amino acid sequence of any one of SEQ ID NOs: 48to58,or
(ii) is encoded by a nucleic acid molecule comprising or consisting of the sequence of any one of SEQ ID NOs: 106 to 116, or
(iii) is a fragment of the protein according to (i) or (ii) and acts as a protein tyrosine phosphatase for Eph receptor tyrosine kinases; or
(iv) has a sequence at least 75% identical with the protein according to (i) or (ii) or with the fragment according to (iii) and acts as a protein tyrosine phosphatase for Eph receptor tyrosine kinases; and
(b) determining whether said test compound, upon contacting in step (a) activates the expression and/or activity of said protein wherein said activation indicates a compound suitable as a lead compound and/or as a medicament for the treatment and/or prevention of diabetes.

4. A method of identifying a compound suitable as a lead compound and/or as a medicament for the treatment and/or prevention of diabetes, the method comprising the steps of
(a) contacting a test compound with a protein, wherein said protein
(i) comprises or consists of the amino acid sequence of any one of SEQ ID NOs: 48 to 58, or
(ii) is encoded by a nucleic acid molecule comprising or consisting of the sequence of any one of SEQ ID NOs: 106 to 116, or
(iii) is a fragment of the protein according to (i) or (ii) and acts as a protein tyrosine phosphatase for Eph receptor tyrosine kinases; or
(iv) has a sequence at least 75% identical with the protein according to (i) or (ii) or with the fragment according to (iii) and acts as a protein tyrosine phosphatase for Eph receptor tyrosine kinases; and
(b) determining whether said test compound, upon contacting in step (a) enhances the activity of said protein wherein said enhancement indicates a compound suitable as a lead compound and/or as a medicament for the treatment and/or prevention of diabetes.

5. A method of identifying a compound suitable as a lead compound and/or as a medicament for the treatment and/or prevention of diabetes, the method comprising the steps of
(a) contacting a test compound with a cell comprising a protein, wherein said protein
(i) comprises or consists of the amino acid sequence of any one of SEQ ID NOs: 30 to 47, or
(ii) is encoded by a nucleic acid molecule comprising or consisting of the sequence of any one of SEQ ID NOs: 88 to 105, or
(iii) is a fragment of the protein according to (i) or (ii) and exhibits ephrin activity, or
(iv) has a sequence at least 75% identical with the protein according to (i) or (ii) or with the fragment according to (iii) and exhibits ephrin activity; and
(b) determining whether said test compound, upon contacting in step (a) activates the expression and/or activity of said protein wherein said activation indicates a compound suitable as a lead compound and/or as a medicament for the treatment and/or prevention of diabetes.

6. The method of any one of claims 1 to 5, wherein said cell is a pancreatic beta-cell or a cell from a beta-cell line.

7. The method of any one of claims 1 to 5, wherein determining in step (b) comprises quantifying insulin secretion.

8. The method of any one of claims 1 to 5 wherein determining in step (b) comprises quantifying F-actin in said cell, wherein the quantity of F-actin is determined at stimulatory glucose concentrations and wherein a decreased quantity of F-actin in the cell contacted with the test compound indicates a compound suitable as a lead compound and/or as a medicament for the treatment and/or prevention of diabetes.

9. The method of any one of claims 1 to 5, wherein said protein is comprised in a cell expressing, or transfected with, a nucleic acid encoding said protein.

10. The method of any one of claims 1 to 5, wherein said cell is comprised in a non-human animal.

11. The method of claim 10, wherein determining in step (b) involves quantifying insulin secretion.

The application's sequence listing, which the Patent Office published only in electronic form, follows.

SEQUENCE LISTING (156 sequences)

SEQ ID NO: 1 - protein, 976 aa, human
MERRWPLGLGLVLLLCAPLPPGARAKEVTLMDTSKAQGELGWLLDPPKDGWSEQQQILNGTPLYMYQDCPMQGRRDTDHWLRSNWIYRGEEASRVHVELQFTVRDCKSFPGGAGPLGCKETFNLLYMESDQDVGIQLRRPLFQKVTTVAADQSFTIRDLASGSVKLNVERCSLGRLTRRGLYLAFHNPGACVALVSVRVFYQRCPETLNGLAQFPDTLPGPAGLVEVAGTCLPHARASPRPSGAPRMHCSPDGEWLVPVGRCHCEPGYEEGGSGEACVACPSGSYRMDMDTPHCLTCPQQSTAESEGATICTCESGHYRAPGEGPQVACTGPPSAPRNLSFSASGTQLSLRWEPPADTGGRQDVRYSVRCSQCQGTAQDGGPCQPCGVGVHFSPGARGLTTPAVHVNGLEPYANYTFNVEAQNGVSGLGSSGHASTSVSISMGHAESLSGLSLRLVKKEPRQLELTWAGSRPRSPGANLTYELHVLNQDEERYQMVLEPRVLLTELQPDTTYIVRVRMLTPLGPGPFSPDHEFRTSPPVSRGLTGGEIVAVIFGLLLGAALLLGILVFRSRRAQRQRQQRQRDRATDVDREDKLWLKPYVDLQAYEDPAQGALDFTRELDPAWLMVDTVIGEGEFGEVYRGTLRLPSQDCKTVAIKTLKDTSPGGQWWNFLREATIMGQFSHPHILHLEGVVTKRKPIMIITEFMENGALDAFLREREDQLVPGQLVAMLQGIASGMNYLSNHNYVHRDLAARNILVNQNLCCKVSDFGLTRLLDDFDGTYETQGGKIPIRWTAPEAIAHRIFTTASDVWSFGIVMWEVLSFGDKPYGEMSNQEVMKSIEDGYRLPPPVDCPAPLYELMKNCWAYDRARRPHFQKLQAHLEQLLANPHSLRTIANFDPRMTLRLPSLSGSDGIPYRTVSEWLESIRMKRYILHFHSAGLDTMECVLELTAEDLTQMGITLPGHQKRILCSIQGFKD

SEQ ID NO: 2 - protein, 977 aa, mouse
MERRWPLGLALLLLLLCAPLPPGARAEEVTLMDTSTAQGELGWLLDPPETGWSEVQQMLNGTPLYMYQDCPIQEGGDTDHWLRSNWIYRGEEASRIYVELQFTVRDCKSFPGGAGPLGCKETFNLFYMESDQDVGIQLRRPLFQKVTTVAADQSFTIRDLASGSVKLNVERCSLGHLTRRGLYLAFHNPGSCVALVSVRVFYQRCAETVHGLAHFPDTLPGPGGLVEVAGTCLSHAQISLGSSGTPRMHCSPDGEWLVPVGQCQCEPGYEESSGNVGCTACPTGFYRVDMNTLRCLKCPQHSIAESEGSTICTCENGHYRAPGEGPQVACTRPPSAPQNLSFSTSGTQLSLRWEPPRDTGGRHDIRYSVECLQCRGIAQDGGPCQPCGKGVHFSPAASGLTTSTVQVQGLEPYANYTFTVKSQNRVSGLDSSSPSSASLSINMGHAESLSGLSLKLVKKEPRQLELTWAGSRPRNPGGNLSYELHVLNQDEEWHQMVLEPRVLLTKLQPDTTYIVRVRTLTPLGPGPFSPDHEFRTSPPVSRSLTGGEIVAVIFGLLLGIALLIGIYVFRSRRGQRQRQQRQRERTTNVDREDKLWLKPYVDLQAYEDPAQGALDFAQELDPAWLIVDTVIGEGEFGEVYRGALRLPSQDCKTVAIKTLKDTSPDGYWWNFLREATIMGQFNHPHILRLEGVITKRKPIMIITEFMENGALDAFLKEREDQLAPGQLVAMLLGIASGMNCLSGHNYVHRDLAARNILVNQNLCCKVSDFGLTRLLDDFDGTYETQGGKIPIRWTAPEAIAHRIFTTASDVWSFGIVMWEVLSFGDKPYGEMSNQEVMKSIEDGYRLPPPVDCPAPLYELMKNCWAYDRARRPHFLQLQAHLEQLLTDPHSLRTIANFDPRVTLRLPSLSGSDGIPYRSVSEWLESIRMKRYILHFRSAGLDTMECVLELTAEDLTQMGITLPGHQKRILCSIQGFKD

SEQ ID NO: 3 - protein, 977 aa, rat
MERRWPLGLALLLLLLCAPLPPGARAEEVTLMDTSTAQGELGWLLDPPETGWSEVQQMLNGTPLYMYQDCPIQEGGDTDHWLRSNWIYRGEEASRVHVELQFTVRDCKSFPGGAGPLGCKETFNLFYMESDQDVGIQLRRPLFQKVTTVAADQSFTIRDLASGSVKLNVEHCSLGHLTRRGLYLAFHNPGSCVALVSVRVFYQRCAETVHGLAHFPHTLPGPTGLVEVAGTCLSHAQISLGSSGTPRMHCSPDGEWLVPVGQCQCEPGYEESGGSVGCTACPTGFYRMDMNTLHCLKCPQHSVAESEGSTICTCENGHYRAPGEGPQVACTRPPSAPQNLSFSASGTQLSLRWEPPRDTGGRQDIRYSVECLQCRGIAQDGGPCQPCGKGVHFSPAASGLTASTVQVEGLEPYANYTFTIKSQNRVSGLDSSSPSSASLSINMGQAESLSGLSLKLVKKEPRQLELTWAGSRLQNPGGNLSYELHVLNQDEEWHQMVLEPRVLLTKLQPDTTYIVRVRTLTPLGPGPFSPDHEFRTSPPVSRSLTGGEIVAIIFGLLLGIALLIGIYVFRSRRGQRQRQQRQRERTTNVDREDKLWLKPYVDLQAYEDPAQGALDFAQELDPAWLIVDTVIGEGEFGEVYRGALRIPSQDCKTVAIKTLKDTSPDGYWWNFLREATIMGQFNHPHILRLEGVITKRKPIMIITEFMENGALDAFLKEREDQLVPGQLVAMLLGIASGMNYLSGHNYVHRDLAARNILVNQNLCCKVSDFGLTRLLDDFDGTYETQGGKIPIRWTAPEAIAHRIFTTASDVWSFGIVMWEVLSFGDKPYGEMSNQEVMKSIEDGYRLPPPVDCPAPLYELMKNCWAYDRARRPHFLQLQAHLEQLLTDPHSLRTIANFDPRVTLRLPSLSGSDGIPYRSVSEWLESIRMKRYILHFRSAGLDTMECVLELTAEDLTQMGITLPGHQKRILCSIQGFKD

SEQ ID NO: 4 - protein, 976 aa, human
MELQAARACFALLWGCALAAAAAAQGKEVVLLDFAAAGGELGWLTHPYGKGWDLMQNIMNDMPIYMYSVCNVMSGDQDNWLRTNWVYRGEAERIFIELKFTVRDCNSFPGGASSCKETFNLYYAESDLDYGTNFQKRLFTKIDTIAPDEITVSSDFEARHVKLNVEERSVGPLTRKGFYLAFQDIGACVALLSVRVYYKKCPELLQGLAHFPETIAGSDAPSLATVAGTCVDHAVVPPGGEEPRMHCAVDGEWLVPIGQCLCQAGYEKVEDACQACSPGFFKFEASESPCLECPEHTLPSPEGATSCECEEGFFRAPQDPASMPCTRPPSAPHYLTAVGMGAKVELRWTPPQDSGGREDIVYSVTCEQCWPESGECGPCEASVRYSEPPHGLTRTSVTVSDLEPHMNYTFTVEARNGVSGLVTSRSFRTASVSINQTEPPKVRLEGRSTTSLSVSWSIPPPQQSRVWKYEVTYRKKGDSNSYNVRRTEGFSVTLDDLAPDTTYLVQVQALTQEGQGAGSKVHEFQTLSPEGSGNLAVIGGVAVGVVLLLVLAGVGFFIHRRRKNQRARQSPEDVYFSKSEQLKPLKTYVDPHTYEDPNQAVLKFTTEIHPSCVTRQKVIGAGEFGEVYKGMLKTSSGKKEVPVAIKTLKAGYTEKQRVDFLGEAGIMGQFSHHNIIRLEGVISKYKPMMIITEYMENGALDKFLREKDGEFSVLQLVGMLRGIAAGMKYLANMNYVHRDLAARNILVNSNLVCKVSDFGLSRVLEDDPEATYTTSGGKIPIRWTAPEAISYRKFTSASDVWSFGIVMWEVMTYGERPYWELSNHEVMKAINDGFRLPTPMDCPSAIYQLMMQCWQQERARRPKFADIVSILDKLIRAPDSLKTLADFDPRVSIRLPSTSGSEGVPFRTVSEWLESIKMQQYTEHFMAAGYTAIEKVVQMTNDDIKRIGVRLPGHQKRIAYSLLGLKDQVNTVGIPI

SEQ ID NO: 5 - protein, 977 aa, mouse
MELRAVGFCLALLWGCALAAAAAQGKEVVLLDFAAMKGELGWLTHPYGKGWDLMQNIMDDMPIYMYSVCNVVSGDQDNWLRTNWVYREEAERIFIELKFTVRDCNSFPGGASSCKETFNLYYAESDVDYGTNFQKRQFTKIDTIAPDEITVSSDFEARNVKLNVEERMVGPLTRKGFYLAFQDIGACVALLSVRVYYKKCPEMLQSLARFPETIAVAVSDTQPLATVAGTCVDHAVVPYGGEGPLMHCTVDGEWLVPIGQCLCQEGYEKVEDACRACSPGFFKSEASESPCLECPEHTLPSTEGATSCQCEEGYFRAPEDPLSMSCTRPPSAPNYLTAIGMGAKVELRWTAPKDTGGRQDIVYSVTCEQCWPESGECGPCEASVRYSEPPHALTRTSVTVSDLEPHMNYTFAVEARNGVSGLVTSRSFRTASVSINQTEPPKVRLEDRSTTSLSVTWSIPVSQQSRVWKYEVTYRKKGDANSYNVRRTEGFSVTLDDLAPDTTYLVQVQALTQEGQGAGSKVHEFQTLSTEGSANMAVIGGVAVGVVLLLVLAGVGLFIHRRRRNLRARQSSEDVRFSKSEQLKPLKTYVDPHTYEDPNQAVLKFTTEIHPSCVARQKVIGAGEFGEVYKGTLKASSGKKEIPVAIKTLKAGYTEKQRVDFLSEASIMGQFSHHNIIRLEGVVSKYKPMMIITEYMENGALDKFLREKDGEFSVLQLVGMLRGIASGMKYLANMNYVHRDLAARNILVNSNLVCKVSDFGLSRVLEDDPEATYTTSGGKIPIRWTAPEAISYRKFTSASDVWSYGIVMWEVMTYGERPYWELSNHEVMKAINDGFRLPTPMDCPSAIYQLMMQCWQQERSRRPKFADIVSILDKLIRAPDSLKTLADFDPRVSIRLPSTSGSEGVPFRTVSEWLESIKMQQYTEHFMVAGYTAIEKVVQMSNEDIKRIGVRLPGHQKRIAYSLLGLKDQVNTVGIPI

SEQ ID NO: 6 - protein, 977 aa, rat
MKLRAAGFCLALLWGCALAAAAAQGKEVVLLDFAAMKGELGWLTHPYGKGWDLMQNIMNDMPIYMYSVCNVVSGDQDNWLRTNWVYREEAERIFIELKFTVRDCNSFPGGASSCKETFNLYYAESDVDYGTNFQKRQFTKIDTIAPDEITVSSDFEARNVKLNVEERMVGPLTRKGFYLAFQDIGACVALLSVRVYYKKCPEMLQSLARFPETIAVAVSDAQPLATVAGTCVDHAVVPYGGEGPLMHCTVDGEWLVPIGQCLCQEGYEKVEDACQACSPGFFKSEASESPCLQCPEHTLPSTEGATSCQCEEGYFRAPEDPLSMPCTRPPSAPHYLTAIGMGAKVELRWTAPQDTGGRKDIVYSVTCEQCWPESGECGSCEASVQYSEPPQALTRTSVTVSDLEPHMNYTFTVEARNGVSDLVNSRSFRTASVSINQTEPPKVRLEDRSTTSLSVAWSIPVPQQSRVWKYEVTYRKKGDANSYNVHRTDGFSVTLDGLAPGTTYLVQVQALTQEGQGAGSKVHEFQTLSTEGSATMAVIGGVAVGVVLLLVLAGIGFFIHRRRRNLRARQSSEDVYFSKSEQLKPLKTYVDPHTYEDPNQAVLKFTTEIHPSCVSRQKVIGAGEFGEVYKGTLKSSSGKKEIPVAIKTLKAGYTEKQRVDFLSEASIMGQFSHHNIIRLEGVVSKYKPMMIITEYMENGALDKFLREKDGEFSVLQLVGMLRGIASGMKYLANMNYVHRDLAARNILVNSNLVCKVSDFGLSRVLEDDPEATYTTSGGKIPIRWTAPEAISYRKFTSASDVWSYGIVMWEVMTYGERPYWELSNHEVMKAINDGFRLPTPMDCPSAIYQLMMQCWQQERSRRPKFADIVSILDKLIRAPDSLKTLADFDPRVSIRLPSTSGSEGVPFRTVSEWLESIKMQQYTEHFMVAGYTAIEKVVQMSNDDIKRIGVRLPGHQKRIAYSLLGLKDQVNTVGIPI

SEQ ID NO: 7 - protein, 986 aa, human
MAGIFYFALFSCLFGICDAVTGSRVYPANEVTLLDSRSVQGELGWIASPLEGGWEEVSIMDEKNTPIRTYQVCNVMEPSQNNWLRTDWITREGAQRVYIEIKFTLRDCNSLPGVMGTCKETFNLYYYESDNDKERFIRENQFVKIDTIAADESFTQVDIGDRIMKLNTEIRDVGPLSKKGFYLAFQDVGACIALVSVRVFYKKCPLTVRNLAQFPDTITGADTSSLVEVRGSCVNNSEEKDVPKMYCGADGEWLVPIGNCLCNAGHEERSGECQACKIGYYKALSTDATCAKCPPHSYSVWEGATSCTCDRGFFRADNDAASMPCTRPPSAPLNLISNVNETSVNLEWSSPQNTGGRQDISYNVVCKKCGAGDPSKCRPCGSGVHYTPQQNGLKTTKVSITDLLAHTNYTFEIWAVNGVSKYNPNPDQSVSVTVTTNQAAPSSIALVQAKEVTRYSVALAWLEPDRPNGVILEYEVKYYEKDQNERSYRIVRTAARNTDIKGLNPLTSYVFHVRARTAAGYGDFSEPLEVTTNTVPSRIIGDGANSTVLLVSVSGSVVLVVILIAAFVISRRRSKYSKAKQEADEEKHLNQGVRTYVDPFTYEDPNQAVREFAKEIDASCIKIEKVIGVGEFGEVCSGRLKVPGKREICVAIKTLKAGYTDKQRRDFLSEASIMGQFDHPNIIHLEGVVTKCKPVMIITEYMENGSLDAFLRKNDGRFTVIQLVGMLRGIGSGMKYLSDMSYVHRDLAARNILVNSNLVCKVSDFGMSRVLEDDPEAAYTTRGGKIPIRWTAPEAIAYRKFTSASDVWSYGIVMWEVMSYGERPYWDMSNQDVIKAIEEGYRLPPPMDCPIALHQLMLDCWQKERSDRPKFGQIVNMLDKLIRNPNSLKRTGTESSRPNTALLDPSSPEFSAVVSVGDWLQAIKMDRYKDNFTAAGYTTLEAVVHVNQEDLARIGITAITHQNKILSSVQAMRTQMQQMHGRMVPV

SEQ ID NO: 8 - protein, 986 aa, mouse
MAGIFYFILFSFLFGICDAVTGSRVYPANEVTLLDSRSVQGELGWIASPLEGGWEEVSIMDEKNTPIRTYQVCNVMEASQNNWLRTDWITREGAQRVYIEIKFTLRDCNSLPGVMGTCKETFNLYYYESDNDKERFIRESQFGKIDTIAADESFTQVDIGDRIMKLNTEIRDVGPLSKKGFYLAFQDVGACIALVSVRVFYKKCPLTVRNLAQFPDTITGADTSSLVEVRGSCVNNSEEKDVPKMYCGADGEWLVPIGNCLCNAGHEEQNGECQACKIGYYKALSTDASCAKCPPHSYSVWEGATSCTCDRGFFRADNDAASMPCTRPPSAPLNLISNVNETSVNLEWSSPQNTGGRQDISYNVVCKKCGAGDPSKCRPCGSGVHYTPQQNGLKTTRVSITDLLAHTNYTFEIWAVNGVSKYNPSPDQSVSVTVTTNQAAPSSIALVQAKEVTRYSVALAWLEPDRPNGVILEYEVKYYEKDQNERSYRIVRTAARNTDIKGLNPLTSYVFHVRARTAAGYGDFSEPLEVTTNTVPSRIIGDGANSTVLLVSVSGSVVLVVILIAAFVISRRRSKYSKAKQEADEEKHLNQGVRTYVDPFTYEDPNQAVREFAKEIDASCIKIEKVIGVGEFGEVCSGRLKVPGKREICVAIKTLKAGYTDKQRRDFLSEASIMGQFDHPNIIHLEGVVTKCKPVMIITEYMENGSLDAFLRKNDGRFTVIQLVGMLRGIGSGMKYLSDMSYVHRDLAARNILVNSNLVCKVSDFGMSRVLEDDPEAAYTTRGGKIPIRWTAPEAIAYRKFTSASDVWSYGIVMWEVMSYGERPYWDMSNQDVIKAIEEGYRLPPPMDCPIALHQLMLDCWQKERSDRPKFGQIVNMLDKLIRNPNSLKRTGSESSRPNTALLDPSSPEFSAVVSVGDWLQAIKMDRYKDNFTAAGYTTLEAVVHMSQDDLARIGITAITHQNKILSSVQAMRTQMQQMHGRMVPV

SEQ ID NO: 9 - protein, 986 aa, rat
MAGIFYFILFSFLFGICDAVTGSRVYPANEVTLLDSRSVQGELGWIASPLEGGWEEVSIMDEKNTPIRTYQVCNVMEASQNNWLRTDWITREGAQRVYIEIKFTLRDCNSLPGVMGTCKETFNLYYYESDNDKERFIRESQFGKIDTIAADESFTQVDIGDRIMKLNTEIRDVGPLSKKGFYLAFQDVGACIALVSVRVFYKKCPLTVRNLAQFPDTITGADTSSLVEVRGSCVNNSEEKDVPKMYCGADGEWLVPIGNCLCNAGHEEQNGECQACKIGYYKALSTDATCAKCPPHSYSVWEGATSCTCDRGFFRADNDAASMPCTRPPSAPLNLISNVNETSVNLEWSSPQNTGGRQDISYNVVCKKCGAGDPSKCRPCGSGVHYTPQQNGLKTTRVSITDLLAHTNYTFEIWAVNGVSKYNPSPDQSVSVTVTTNQAAPSSIALVQAKEVTRYSVALAWLEPDRPNGVILEYEVKYYEKDQNERSYRIVRTAARNTDIKGLNPLTSYVFHVRARTAAGYGDFSEPLEVTTNTVPSRIIGDGANSTVLLVSVSGSVVLVVILIAAFVISRRRSKYSQAKQEADEEKHLNQGVRTYVDPFTYEDPNQAVREFAKEIDASCIKIEKVIGVGEFGEVCSGRLKVPGKREICVAIKTLKAGYTDKQRRDFLSEASIMGQFDHPNIIHLEGVVTKCKPVMIITEYMENGSLDAFLRKNDGRFTVIQLVGMLRGIGSGMKYLSDMSYVHRDLAARNILVNSNLVCKVSDFGMSRVLEDDPEAAYTTRGGKIPIRWTAPEAIAYRKFTSASDVWSYGIVMWEVMSYGERPYWDMSNQDVIKAIEEGYRLPPPMDCPIALHQLMLDCWQKERSDRPKFGQIVNMLDKLIRNPNSLKRTGPESSRPNTALLDPSSPEFSAVVSVGDWLQAIKMDRYKDNFTAAGYTTLEAVVHMSQDDLARIGITAITHQNKILSSVQAMRTQMQQMHGRMVPV

SEQ ID NO: 10 - protein, 1037 aa, human
MRGSGPRGAGHRRPPSGGGDTPITPASLAGCYSAPRRAPLWTCLLLCAALRTLLASPSNEVNLLDSRTVMGDLGWIAFPKNGWEEIGEVDENYAPIHTYQVCKVMEQNQNNWLLTSWISNEGASRIFIELKFTLRDCNSLPGGLGTCKETFNMYYFESDDQNGRNIKENQYIKIDTIAADESFTELDLGDRVMKLNTEVRDVGPLSKKGFYLAFQDVGACIALVSVRVYYKKCPSVVRHLAVFPDTITGADSSQLLEVSGSCVNHSVTDEPPKMHCSAEGEWLVPIGKCMCKAGYEEKNGTCQVCRPGFFKASPHIQSCGKCPPHSYTHEEASTSCVCEKDYFRRESDPPTMACTRPPSAPRNAISNVNETSVFLEWIPPADTGGRKDVSYYIACKKCNSHAGVCEECGGHVRYLPRQSGLKNTSVMMVDLLAHTNYTFEIEAVNGVSDLSPGARQYVSVNVTTNQAAPSPVTNVKKGKIAKNSISLSWQEPDRPNGIILEYEIKYFEKDQETSYTIIKSKETTITAEGLKPASVYVFQIRARTAAGYGVFSRRFEFETTPVFAASSDQSQIPVIAVSVTVGVILLAVVIGVLLSGSCCECGCGRASSLCAVAHPSLIWRCGYSKAKQDPEEEKMHFHNGHIKLPGVRTYIDPHTYEDPNQAVHEFAKEIEASCITIERVIGAGEFGEVCSGRLKLPGKRELPVAIKTLKVGYTEKQRRDFLGEASIMGQFDHPNIIHLEGVVTKSKPVMIVTEYMENGSLDTFLKKNDGQFTVIQLVGMLRGISAGMKYLSDMGYVHRDLAARNILINSNLVCKVSDFGLSRVLEDDPEAAYTTRGGKIPIRWTAPEAIAFRKFTSASDVWSYGIVMWEVVSYGERPYWEMTNQDVIKAVEEGYRLPSPMDCPAALYQLMLDCWQKERNSRPKFDEIVNMLDKLIRNPSSLKTLVNASCRVSNLLAEHSPLGSGAYRSVGEWLEAIKMGRYTEIFMENGYSSMDAVAQVTLEDLRRLGVTLVGHQKKIMNSLQEMKVQLVNGMVPL

SEQ ID NO: 11 - protein, 876 aa, mouse
MRGSGPRGAGHRRTQGRGGGDDTPRVPASLAGCYSAPLKGPLWTCLLLCAALRTLLASPSNEVNLLDSRTVMGDLGWIAFPKNGWEEIGEVDENYAPIHTYQVCKVMEQNQNNWLLTSWISNEGASRIFIELKFTLRDCNSLPGGLGTCKETFNMYYFESDDENGRSIKENQYIKIDTIAADESFTELDLGDRVMKLNTEVRDVGPLSKKGFYLAFQDVGACIALVSVRVYYKKCPSVVRHLAIFPDTITGADSSQLLEVSGSCVNHSVTDDPPKMHCSAEGEWLVPIGKCMCKAGYEEKNGTCQAPSPVTNVKKGKIAKNSISLSWQEPDRPNGIILEYEIKYFEKDQETSYTIIKSKETSITAEGLKPASVYVFQIRARTAAGYGVFSRRFEFETTPVSVAASNDQSQIPIIAVSVTVGVILLAVMIGFLLSGSCCDCGCGRASSLCAVAHPSLIWRCGYSKAKQDPEEEKMHFHNGHIKLPGVRTYIDPHTYEDPNQAVHEFAKEIEASCITIERVIGAGEFGEVCSGRLKLPGKRELPVAIKTLKVGYTEKQRRDFLGEASIMGQFDHPNIIHLEGVVTKSKPVMIVTEYMENGSLDTFLKKNDGQFTVIQLVGMLRGIAAGMKYLSDMGYVHRDLAARNILINSNLVCKVSDFGLSRVLEDDPEAAYTTRGGKIPIRWTAPEAIAFRKFTSSSDVWSYGIVMWEVVSYGERPYWEMTNQDVIKAVEEGYRLPSPMDCPAALYQLMLDCWQKDRNSRPKFDEIVNMLDKLIRNPSSLKTLVNASSRVSTLLAEHGSLGSGAYRSVGEWLEAIKMGRYTEIFMENGYSSMDAVAQVTLEDLRRLGVTLVGHQKKIMSSLQEMKVQMVNGMVPV

SEQ ID NO: 12 - protein, 1040 aa, rat
  misc_feature (641)..(641): Xaa can be any naturally occurring amino acid
  misc_feature (645)..(645): Xaa can be any naturally occurring amino acid
  misc_feature (654)..(654): Xaa can be any naturally occurring amino acid
  misc_feature (667)..(667): Xaa can be any naturally occurring amino acid
  misc_feature (680)..(680): Xaa can be any naturally occurring amino acid
  misc_feature (687)..(687): Xaa can be any naturally occurring amino acid
  misc_feature (690)..(690): Xaa can be any naturally occurring amino acid
  misc_feature (693)..(693): Xaa can be any naturally occurring amino acid
  misc_feature (712)..(712): Xaa can be any naturally occurring amino acid
  misc_feature (717)..(717): Xaa can be any naturally occurring amino acid
  misc_feature (726)..(726): Xaa can be any naturally occurring amino acid
  misc_feature (734)..(734): Xaa can be any naturally occurring amino acid
  misc_feature (747)..(747): Xaa can be any naturally occurring amino acid
  misc_feature (749)..(749): Xaa can be any naturally occurring amino acid
  misc_feature (795)..(795): Xaa can be any naturally occurring amino acid
  misc_feature (806)..(806): Xaa can be any naturally occurring amino acid
  misc_feature (813)..(813): Xaa can be any naturally occurring amino acid
  misc_feature (820)..(820): Xaa can be any naturally occurring amino acid
  misc_feature (830)..(830): Xaa can be any naturally occurring amino acid
  misc_feature (832)..(832): Xaa can be any naturally occurring amino acid
  misc_feature (862)..(862): Xaa can be any naturally occurring amino acid
  misc_feature (928)..(929): Xaa can be any naturally occurring amino acid
  misc_feature (936)..(936): Xaa can be any naturally occurring amino acid
  misc_feature (943)..(943): Xaa can be any naturally occurring amino acid
  misc_feature (974)..(974): Xaa can be any naturally occurring amino acid
MRGSGPRGAGRRRTQGRGGGGDTPRVPASLAGCYSAPLKGPLWTCLLLCAALRTLLASPSNEVNLLDSRTVLGDLGWIAFPKNGWEEIGEVDENYAPIHTYQVCKVMEQNQNNWLLTSWISNEGASRIFIELKFTLRDCNSLPGGLGTCKETFNMYYFESDDENGRNIKENQYIKIDTIAADESFTELDLGDRVMKLNTEVRDVGPLSKKGFYLAFQDVGACIALVSVRVYYKKCPSVVRHLAVFPDTITGADSSQLLEVSGSCVNHSVTDDPPKMHCSAEGEWLVPIGKCMCKAGYEEKNGTCQVCRPGFFKASPHSQTCSKCPPHSYTHEEASTSCVCEKDYFRRESDPPTMACTRPPSAPRNAISNVNETSVFLEWIPPADTGGRKDVSYYIACKKCNSHAGVCEECGGHVRYLPQQIGLKNTSVMMADLLAHTNYTFEIEAVNGVSDLSPGTRQYVSVNVTTNQAAPSPVTNVKKGKIAKNSISLSWQEPDRPNGIILEYEIKYFEKDQETSYTIIKSKETTITAEGLKPASVYVFQIRARTAAGYGVFSRRFEFETTPVFAASNDQSQIPIIAVSVTVGVILLAVMIGFLLSGSCCDMWLWEGFFPVRCCPSKPNMAVWLQQSKAGSRRGKDALSXRAHXTARSKNVHXSTHLRRSHSSRSXICQGDRGLMHHHXESYWSRXIWXSLXWTFETTRKKRIACGYQNSXSRLHXKAAQRFSEXSEYHGAVXSSKHHPSRRRCDXKXTCDDSDRVHGEWLLRHIFKEKRWPVHCDSACWHAERHRCRNEVPFXHGLRAQRPCCXKHLNQQXPCVQSVXLWTFQGAGRXSXGSLYHKGRQNSNQVDCSRSNSFSKVYLCQXCLELWNRNVGSCVLWRETVLGDDQSGCDQGSGRRLPPAKPHGLSCCPLSINAGLLAERSQQQAQVXXHSQHAGXADTKPKXFEDTGERVKQGIYFVGRTWIFGVWGLQISRXMARSNQNGPVHRDFHGKWIQFNGRCGSGDLGGFETPGSDSGRSPEEDHEQPSRDEGAAGKRDGASV

SEQ ID NO: 13 - protein, 998 aa, human
MVFQTRYPSWIILCYIWLLRFAHTGEAQAAKEVLLLDSKAQQTELEWISSPPNGWEEISGLDENYTPIRTYQVCQVMEPNQNNWLRTNWISKGNAQRIFVELKFTLRDCNSLPGVLGTCKETFNLYYYETDYDTGRNIRENLYVKIDTIAADESFTQGDLGERKMKLNTEVREIGPLSKKGFYLAFQDVGACIALVSVKVYYKKCWSIIENLAIFPDTVTGSEFSSLVEVRGTCVSSAEEEAENAPRMHCSAEGEWLVPIGKCICKAGYQQKGDTCEPCGRGFYKSSSQDLQCSRCPTHSFSDKEGSSRCECEDGYYRAPSDPPYVACTRPPSAPQNLIFNINQTTVSLEWSPPADNGGRNDVTYRILCKRCSWEQGECVPCGSNIGYMPQQTGLEDNYVTVMDLLAHANYTFEVEAVNGVSDLSRSQRLFAAVSITTGQAAPSQVSGVMKERVLQRSVELSWQEPEHPNGVITEYEIKYYEKDQRERTYSTVKTKSTSASINNLKPGTVYVFQIRAFTAAGYGNYSPRLDVATLEEATGKMFEATAVSSEQNPVIIIAVVAVAGTIILVFMVFGFIIGRRHCGYSKADQEGDEELYFHFKFPGTKTYIDPETYEDPNRAVHQFAKELDASCIKIERVIGAGEFGEVCSGRLKLPGKRDVAVAIKTLKVGYTEKQRRDFLCEASIMGQFDHPNVVHLEGVVTRGKPVMIVIEFMENGALDAFLRKHDGQFTVIQLVGMLRGIAAGMRYLADMGYVHRDLAARNILVNSNLVCKVSDFGLSRVIEDDPEAVYTTTGGKIPVRWTAPEAIQYRKFTSASDVWSYGIVMWEVMSYGERPYWDMSNQDVIKAIEEGYRLPAPMDCPAGLHQLMLDCWQKERAERPKFEQIVGILDKMIRNPNSLKTPLGTCSRPISPLLDQNTPDFTTFCSVGEWLQAIKMERYKDNFTAAGYNSLESVARMTIEDVMSLGITLVGHQKKIMSSIQTMRAQMLHLHGTGIQV

SEQ ID NO: 14 - protein, 998 aa, mouse
MVVQTRFPSWIILCYIWLLGFAHTGEAQAAKEVLLLDSKAQQTELEWISSPPSGWEEISGLDENYTPIRTYQVCQVMEPNQNNWLRTNWISKGNAQRIFVELKFTLRDCNSLPGVLGTCKETFNLYYYETDYDTGRNIRENLYVKIDTIAADESFTQGDLGERKMKLNTEVREIGPLSKKGFYLAFQDVGACIALVSVKVYYKKCWTIVENLAVFPDTVTGSEFSSLVEVRGTCVSSAEEEAENSPRMHCSAEGEWLVPIGKCICKAGYQQKGDTCEPCGRRFYKSSSQDLQCSRCPTHSFSDREGSSRCECEDGYYRAPSDPPYVACTRPPSAPQNLIFNINQTTVSLEWSPPADNGGRNDVTYRILCKRCSWEQGECVPCGSNIGYMPQQTGLEDNYVTVMDLLAHANYTFEVEAVNGVSDLSRSQRLFAAVSITTGQAAPSQVSGVMKERVLQRSVQLSWQEPEHPNGVITEYEIKYYEKDQRERTYSTLKTKSTSASINNLKPGTVYVFQIRAVTAAGYGNYSPRLDVATLEEASGKMFEATAVSSEQNPVIIIAVVAVAGTIILVFMVFGFIIGRRHCGYSKADQEGDEELYFHFKFPGTKTYIDPETYEDPNRAVHQFAKELDASCIKIERVIGAGEFGEVCSGRLKLPGQRDVAVAIKTLKVGYTEKQRRDFLCEASIMGQFDHPNVVHLEGVVTRGKPVMIVIEFMENGALDAFLRKHDGQFTVIQLVGMLRGIAAGMRYLADMGYVHRDLAARNILVNSNLVCKVSDFGLSRVIEDDPEAVYTTTGGKIPVRWTAPEAIQYRKFTSASDVWSYGIVMWEVMSYGERPYWDMSNQDVIKAIEEGYRLPAPMDCPAGLHQLMLDCWQKDRAERPKFEQIVGILDKMIRNPSSLKTPLGTCSRPLSPLLDQSTPDFTAFCSVGEWLQAIKMERYKDNFTAAGYNSLESVARMTIDDVMSLGITLVGHQKKIMSSIQTMRAQMLHLHGTGIQV

SEQ ID NO: 15 - protein, 1005 aa, human
MAPARGRLPPALWVVTAAAAAATCVSAARGEVNLLDTSTIHGDWGWLTYPAHGWDSINEVDESFQPIHTYQVCNVMSPNQNNWLRTSWVPRDGARRVYAEIKFTLRDCNSMPGVLGTCKETFNLYYLESDRDLGASTQESQFLKIDTIAADESFTGADLGVRRLKLNTEVRSVGPLSKRGFYLAFQDIGACLAILSLRIYYKKCPAMVRNLAAFSEAVTGADSSSLVEVRGQCVRHSEERDTPKMYCSAEGEWLVPIGKCVCSAGYEERRDACVACELGFYKSAPGDQLCARCPPHSHSAAPAAQACHCDLSYYRAALDPPSSACTRPPSAPVNLISSVNGTSVTLEWAPPLDPGGRSDITYNAVCRRCPWALSRCEACGSGTRFVPQQTSLVQASLLVANLLAHMNYSFWIEAVNGVSDLSPEPRRAAVVNITTNQAAPSQVVVIRQERAGQTSVSLLWQEPEQPNGIILEYEIKYYEKDKEMQSYSTLKAVTTRATVSGLKPGTRYVFQVRARTSAGCGRFSQAMEVETGKPRPRYDTRTIVWICLTLITGLVVLLLLLICKKRHCGYSKAFQDSDEEKMHYQNGQAPPPVFLPLHHPPGKLPEPQFYAEPHTYEEPGRAGRSFTREIEASRIHIEKIIGSGDSGEVCYGRLRVPGQRDVPVAIKALKAGYTERQRRDFLSEASIMGQFDHPNIIRLEGVVTRGRLAMIVTEYMENGSLDTFLRTHDGQFTIMQLVGMLRGVGAGMRYLSDLGYVHRDLAARNVLVDSNLVCKVSDFGLSRVLEDDPDAAYTTTGGKIPIRWTAPEAIAFRTFSSASDVWSFGVVMWEVLAYGERPYWNMTNRDVISSVEEGYRLPAPMGCPHALHQLMLDCWHKDRAQRPRFSQIVSVLDALIRSPESLRATATVSRCPPPAFVRSCFDLRGGSGGGGGLTVGDWLDSIRMGRYRDHFAAGGYSSLGMVLRMNAQDVRALGITLMGHQKKILGSIQTMRAQLTSTQGPRRHL

SEQ ID NO: 16 - protein, 1004 aa, mouse
MAPARARLSPALWVVTAAAAATCVSAGRGEVNLLDTSTIHGDWGWLTYPAHGWDSINEVDESFRPIHTYQVCNVMSPNQNNWLRTNWVPRDGARRVYAEIKFTLRDCNSIPGVLGTCKETFNLHYLESDRDLGASTQESQFLKIDTIAADESFTGADLGVRRLKLNTEVRGVGPLSKRGFYLAFQDIGACLAILSLRIYYKKCPAMVRNLAAFSEAVTGADSSSLVEVRGQCVRHSEERDTPKMYCSAEGEWLVPIGKCVCSAGYEERRDACMACELGFYKSAPGDQLCARCPPHSHSATPAAQTCRCDLSYYRAALDPPSAACTRPPSAPVNLISSVNGTSVTLEWAPPLDPGGRSDITYNAVCRRCPWALSHCEACGSGTRFVPQQTSLAQASLLVANLLAHMNYSFWIEAVNGVSNLSPEPRSAAVVNITTNQAAPSQVVVIRQERAGQTSVSLLWQEPEQPNGIILEYEIKYYEKDKEMQSYSTLKAVTTRATVSGLKPGTRYVFQVRARTSAGCGRFSQAMEVETGKPRPRYDTRTIVWICLTLITGLVVLLLLLICKKRHCGYSKAFQDSDEEKMHYQNGQAPPPVFLPLNHPPGKFPETQFSAEPHTYEEPGRAGRSFTREIEASRIHIEKIIGSGESGEVCYGRLQVPGQRDVPVAIKALKAGYTERQRQDFLSEAAIMGQFDHPNIIRLEGVVTRGRLAMIVTEYMENGSLDAFLRTHDGQFTIVQLVGMLRGVGAGMRYLSDLGYIHRDLAARNVLVDGRLVCKVSDFGLSRALEDDPEAAYTTAGGKIPIRWTAPEAIAFRTFSSASDVWSFGVVMWEVLAYGERPYWNMTNQDVISSVEEGYRLPAPMGCPRALHQLMLDCWHKDRAQRPRFAHVVSVLDALVHSPESLRATATVSRCPPPAFARSCFDLRAGGSGNGDLTVGDWLDSIRMGRYRDHFAAGGYSSLGMVLRMNAQDVRALGITLMGHQKKILGSIQTMRAQLSSTQGRRRHL

SEQ ID NO: 17 - protein, 978 aa, rat
MAGDLNLLDTSTIHGDWGWLTYPAHGWDSINEVDESFRPIHTYQVCNVMSPNQNNWLRTSWVPRDGARRVYAEIKFTLRDCNSIPGVLGTCKETFNLHYLESDRDLGASTQESQFLKIDTIAADESFTGADLGVRRLKLNTEVRGVGPLSKRGFYLAFQDIGACLAILSLRIYYKKCPAMVRNLAAFSEAVTGADSSSLVEVRGQCVRHSEERDTPKMYCSAEGEWLVPIGKCVCSAGYEERRDACMACELGFYKSAPGDQLCARCPPHSHSATPAAQTCRCDLSYYRAALDPPSAACTRPPSAPVNLISSVNGTSVTLEWAPPLDPGGRSDITYNAVCRRCPWALSHCEACGSGTRFVPQQTSLAQASLLVANLLAHMNYSFWIEAVNGVSNLSPEPRNAAVVNITTNQAAPSQVVVIRQERAGQTSVSLLWQEPEQPNGIILEYEIKYYEKDKEMQSYSTLKAVTTRATVSGLKPGTRYMFQVRARTSAGCGRFSQAMEVETGKPRPRYDTRTIVWICLTLITGLVVLLLLLICKKRHCGYSKAFQDSDEEKMHYQNGQAPPPVFLPLNHPPGKLPETQFSAEPHNYEEPGRAGRSFTREIEASRIHIEKIIGSGESGEVCYGRLQVPGQRDVPVAIKALKAGYTERQRQDFLREAAIMGQFDHPNIIRLEGVVTRGRLAMIVTEYMENGSLDAFLRTHDGQFTILQLVGMLKGVGAGMRYLSDLGYIHRDLAARNILVDGRLVCKVSDFGLSRALEDDPEAAYTTAGGKIPIRWTAPEAIAFRTFSSASDVWSFGVVMWEVLAYGERPYWNMTNQDVISSVEEGYRLPAPMGCPRALHQLMLDCWHKDRAQRPRFSHVVSVLEALVHSPESLRATATVSRCPAPAFARSCFDLRAGGNGNGDLTVGDWLDSIRMGRYRDHFAAGGYSSLGMVLHMNAQDVRALGITLMGHQKKILGSIQTMRSQLSCTQGPRRHL

SEQ ID NO: 18 - protein, 987 aa, human
MALRRLGAALLLLPLLAAVEETLMDSTTATAELGWMVHPPSGWEEVSGYDENMNTIRTYQVCNVFESSQNNWLRTKFIRRRGAHRIHVEMKFSVRDCSSIPSVPGSCKETFNLYYYEADFDSATKTFPNWMENPWVKVDTIAADESFSQVDLGGRVMKINTEVRSFGPVSRSGFYLAFQDYGGCMSLIAVRVFYRKCPRIIQNGAIFQETLSGAESTSLVAARGSCIANAEEVDVPIKLYCNGDGEWLVPIGRCMCKAGFEAVENGTVCRGCPSGTFKANQGDEACTHCPINSRTTSEGATNCVCRNGYYRADLDPLDMPCTTIPSAPQAVISSVNETSLMLEWTPPRDSGGREDLVYNIICKSCGSGRGACTRCGDNVQYAPRQLGLTEPRIYISDLLAHTQYTFEIQAVNGVTDQSPFSPQFASVNITTNQAAPSAVSIMHQVSRTVDSITLSWSQPDQPNGVILDYELQYYEKELSEYNATAIKSPTNTVTVQGLKAGAIYVFQVRARTVAGYGRYSGKMYFQTMTEAEYQTSIQEKLPLIIGSSAAGLVFLIAVVVIAIVCNRRRGFERADSEYTDKLQHYTSGHMTPGMKIYIDPFTYEDPNEAVREFAKEIDISCVKIEQVIGAGEFGEVCSGHLKLPGKREIFVAIKTLKSGYTEKQRRDFLSEASIMGQFDHPNVIHLEGVVTKSTPVMIITEFMENGSLDSFLRQNDGQFTVIQLVGMLRGIAAGMKYLADMNYVHRDLAARNILVNSNLVCKVSDFGLSRFLEDDTSDPTYTSALGGKIPIRWTAPEAIQYRKFTSASDVWSYGIVMWEVMSYGERPYWDMTNQDVINAIEQDYRLPPPMDCPSALHQLMLDCWQKDRNHRPKFGQIVNTLDKMIRNPNSLKAMAPLSSGINLPLLDRTIPDYTSFNTVDEWLEAIKMGQYKESFANAGFTSFDVVSQMMMEDILRVGVTLAGHQKKILNSIQVMRAQMNQIQSVEV

SEQ ID NO: 19 - protein, 986 aa, mouse
MAVRRLGAALLLLPLLAAVEETLMDSTTATAELGWMVHPPSGWEEVSGYDENMNTIRTYQVCNVFESSQNNWLRTKFIRRRGAHRIHVEMKFSVRDCSSIPSVPGSCKETFNLYYYEADFDLATKTFPNWMENPWVKVDTIAADESFSQVDLGGRVMKINTEVRSFGPVSRNGFYLAFQDYGGCMSLIAVRVFYRKCPRIIQNGAIFQETLSGAESTSLVAARGSCIANAEEVDVPIKLYCNGDGEWLVPIGRCMCKAGFEAVENGTVCRGCPSGTFKANQGDEACTHCPINSRTTSEGATNCVCRNGYYRADLDPLDMPCTTIPSAPQAVISSVNETSLMLEWTPPRDSGGREDLVYNIICKSCGSGRGACTRCGDNVQYAPRQLGLTEPRIYISDLLAHTQYTFEIQAVNGVTDQSPFSPQFASVNITTNQAAPSAVSIMHQVSRTVDSITLSWSQPDQPNGVILDYELQYYEKELSEYNATAIKSPTNTVTVQGLKAGAIYVFQVRARTVAGYGRYSGKMYFQTMTEAEYQTSIKEKLPLIVGSSAAGLVFLIAVVVIAIVCNRRGFERADSEYTDKLQHYTSGHMTPGMKIYIDPFTYEDPNEAVREFAKEIDISCVKIEQVIGAGEFGEVCSGHLKLPGKREIFVAIKTLKSGYTEKQRRDFLSEASIMGQFDHPNVIHLEGVVTKSTPVMIITEFMENGSLDSFLRQNDGQFTVIQLVGMLRGIAAGMKYLADMNYVHRDLAARNILVNSNLVCKVSDFGLSRFLEDDTSDPTYTSALGGKIPIRWTAPEAIQYRKFTSASDVWSYGIVMWEVMSYGERPYWDMTNQDVINAIEQDYRLPPPMDCPSALHQLMLDCWQKDRNHRPKFGQIVNTLDKMIRNPNSLKAMAPLSSGINLPLLDRTIPDYTSFNTVDEWLEAIKMGQYKESFANAGFTSFDVVSQMMMEDILRVGVTLAGHQKKILNSIQVMRAQMNQIQSVEV

SEQ ID NO: 20 - protein, 987 aa, rat
MDLFHFKLYGFFSPLTGSDTETLMDSTTATAELGWMVHPPSGWEEVSGYDENMNTIRTYQVCNVFESSQNNWLRTKFIRRRGAHRIHVEMKFSVRDCSSIPSVPGSCKETFNLYYYEADFDLATKTFPNWMENPWVKVDTIAADESFSQVDLGGRVMKINTEVRSFGPVSRNGFYLAFQDYGGCMSLIAVRVFYRKCPRVIQNGAIFQETLSGAESTSLVAARGSCIANAEEVDVPIKLYCNGDGEWLVPIGRCMCKAGFEAVENGTVCRGCPSGTFKANQGDEACTHCPINSRTTSEGATNCVCRNGYYRADLDPLDMPCTTIPSAPQAVISSVNETSLMLEWTPPRDSGGREDLVYNIICKSCGSGRGACTRCGDNVQYAPRQLGLTEPRIYISDLLAHTQYTFEIQAVNGVTDQSPFSPQFASVNITTNQAAPSAVSIMHQVSRTVDSITLSWSQPDQPNGVILDYELQYYEKELSEYNATAIKSPTNTVTVQGLKAGAIYVFQVRARTVAGYGRYSGKMYFQTMTEAEYQTSIKEKLPLIVGSSAAGVVFVIAVVVIAIVCNRRRGFERADSEYTDKLQHYTSGHMTPGMKIYIDPFTYEDPNEAVREFAKEIDISCVKIEQVIGAGEFGEVCSGHLKLPGKREIFVAIKTLKSGYTEKQRRDFLSEASIMGQFDHPNVIHLEGVVTKSTPVMIITEFMENGSLDSFLRQNDGQFTVIQLVGMLRGIAAGMKYLADMNYVHRDLAARNILVNSNLVCKVSDFGLSRFLEDDTSDPTYTSALGGKIPIRWTAPEAIQYRKFTSASDVWSYGIVMWEVMSYGERPYWDMTNQDVINAIEQDYRLPPPMDCPSALHQLMLDCWQKDRNHRPKFGQIVNTLDKMIRNPNSLKAMAPLSSGINLPLLDRTIPDYTSFNTVDEWLEAIKMGQYKESFTNAGFTSFDVVSQMMMEDILRVGVTLAGHQKKILNSIQVMRAQMNQIQSVEV

SEQ ID NO: 21 - protein, 998 aa, human
MARARPPPPPSPPPGLLPLLPPLLLLPLLLLPAGCRALEETLMDTKWVTSELAWTSHPESGWEEVSGYDEAMNPIRTYQVCNVRESSQNNWLRTGFIWRRDVQRVYVELKFTVRDCNSIPNIPGSCKETFNLFYYEADSDVASASSPFWMENPYVKVDTIAPDESFSRLDAGRVNTKVRSFGPLSKAGFYLAFQDQGACMSLISVRAFYKKCASTTAGFALFPETLTGAEPTSLVIAPGTCIPNAVEVSVPLKLYCNGDGEWMVPVGACTCATGHEPAAKESQCRPCPPGSYKAKQGEGPCLPCPPNSRTTSPAASICTCHNNFYRADSDSADSACTTVPSPPRGVISNVNETSLILEWSEPRDLGGRDDLLYNVICKKCHGAGGASACSRCDDNVEFVPRQLGLTERRVHISHLLAHTRYTFEVQAVNGVSGKSPLPPRYAAVNITTNQAAPSEVPTLRLHSSSGSSLTLSWAPPERPNGVILDYEMKYFEKSEGIASTVTSQMNSVQLDGLRPDARYVVQVRARTVAGYGQYSRPAEFETTSERGSGAQQLQEQLPLIVGSATAGLVFVVAVVVIAIVCLRKQRHGSDSEYTEKLQQYIAPGMKVYIDPFTYEDPNEAVREFAKEIDVSCVKIEEVIGAGEFGEVCRGRLKQPGRREVFVAIKTLKVGYTERQRRDFLSEASIMGQFDHPNIIRLEGVVTKSRPVMILTEFMENCALDSFLRLNDGQFTVIQLVGMLRGIAAGMKYLSEMNYVHRDLAARNILVNSNLVCKVSDFGLSRFLEDDPSDPTYTSSLGGKIPIRWTAPEAIAYRKFTSASDVWSYGIVMWEVMSYGERPYWDMSNQDVINAVEQDYRLPPPMDCPTALHQLMLDCWVRDRNLRPKFSQIVNTLDKLIRNAASLKVIASAQSGMSQPLLDRTVPDYTTFTTVGDWLDAIKMGRYKESFVSAGFASFDLVAQMTAEDLLRIGVTLAGHQKKILSSIQDMRLQMNQTLPVQV

SEQ ID NO: 22 - protein, 993 aa, mouse
MAGARPPPGLLPLLAPLLLPLLLPAGCWALEETLMDTKWVTSELAWTSHPESGWEEVSGYDEAMNPIRTYQVCNVRESSQNNWLRTGFIWRREVQRVYVELKFTVRDCNSIPNIPGSCKETFNLFYYEADSDVASASSPFWMENPYVKVDTIAPDESFSRLDAGRVNTKVRSFGPLSKAGFYLAFQDQGACMSLISVRAFYKKCASTTAGFALFPETLTGAEPTSLVIAPGTCIANAVEVSVPLKLYCNGDGEWMVPVGACTCATGHEPAAKESQCRACPPGSYKAKQGEGPCLPCPPNSRTTSPAASICTCHNNFYRADSDSADSACTTVPSPPRGVISNVNETSLILEWSEPRDLGGRDDLLYNVICKKCRGSSGAGGPATCSRCDDNVEFVPRQLGLTERRVHISHLLAHTRYTFEVQAVNGVSGKSPLPPRYAAVNITTNQAAPSEVPTLHLHSSSGSSLTLSWAPPERPNGVILDYEMKYFEKSKGIASTVTSQKNSVQLDGLQPDARYVVQVRARTVAGYGQYSHPAEFETTSERGSGAQQLQEQLPLIVGSTVAGFVFMVVVVVIALVCLRKQRHGPDAEYTEKLQQYIAPGMKVYIDPFTYEDPNEAVREFAKEIDVSCVKIEEVIGAGEFGEVCRGRLKLPGRREVFVAIKTLKVGYTERQRRDFLSEASIMGQFDHPNIIRLEGVVTKSRPVMILTEFMENCALDSFLRLNDGQFTVIQLVGMLRGIAAGMKYLSEMNYVHRDLAARNILVNSNLVCKVSDFGLSRFLEDDPSDPTYTSSLGGKIPIRWTAPEAIAYRKFTSASDVWSYGIVMWEVMSYGERPYWDMSNQDVINAVEQDYRLPPPMDCPTALHQLMLDCWVRDRNLRPKFSQIVNTLDKLIRNAASLKVTASAPSGMSQPLLDRTVPDYTTFTTVGDWLDAIKMGRYKESFVGAGFASFDLVAQMTAEDLLRIGVTLAGHQKKILCSIQDMRLQMNQTLPVQV

SEQ ID NO: 23 - protein, 993 aa, rat
MAGARPPPGLLPLLAPLLLPLLLPAGCRALEETLMDTKWVTSELAWTSHPESGWEEVSGYDEAMNPIRTYQVCNVRESSQNNWLRTGFIWRREVQRVYVELKFTVRDCNSIPNIPGSCKETFNLFYYEADSDVASASSPFWMENPYVKVDTIAPDESFSRLDAGRVNTKVRSFGPLSKAGFYLAFQDQGACMSLISVRAFYKKCASTTAGFALFPETLTGAEPTSLVIAPGTCIANAVEVSVPLKLYCNGDGEWMVPVGACTCATGHEPAAKETQCRACPPGSYKAKQGEGPCLPCPPNSRTTSPAASICTCHNNFYRADSDTADSACTTVPSPPRGVISNVNETSLILEWSEPRDLGGRDDLLYNVICKKCRGSSGAGGPATCSRCDDNVEFEPRQLGLTERRVHISHLLAHTRYTFEVQAVNGVSGKSPLPPRYAAVNITTNQAAPSEVPTLHLHSSSGSSLTLSWAPPERPNGVILDYEMKYFEKSKGIASTVTSQKNSVQLDGLQPDARYVVQVRARTVAGYGQYSRPAEFETTSERGSGAQQLQEQLPLIVGSTVAGFVFMVVVVVIALVCLRKQRQGPDAEYTEKLQQYVAPRMKVYIDPFTYEDPNEAVREFAKEIDVSCVKIEEVIGAGEFGEVCRGRLKLPGRREVFVAIKTLKVGYTERQRRDFLSEASIMGQFDHPNIIRLEGVVTKSRPVMILTEFMENCALDSFLRLNDGQFTVIQLVGMLRGIAAGMKYLSEMNYVHRDLAARNILVNSNLVCKVSDFGLSRFLEDDPSDPTYTSSLGGKIPIRWTAPEAIAYRKFTSASDVWSYGIVMWEVMSYGERPYWDMSNQDVINAVEQDYRLPPPMDCPTALHQLMLDCWVRDRNLRPKFSQIVNTLDKLIRNAASLKVIASAPSGMSQPLLDRTVPDYTTFTTVGDWLDAIKMGRYKESFVGAGFASFDLVAQMTAEDLLRIGVTLAGHQKKILSSIQDMRLQMNQTLPVQV

SEQ ID NO: 24 - protein, 987 aa, human
MELRVLLCWASLAAALEETLLNTKLETADLKWVTFPQVDGQWEELSGLDEEQHSVRTYEVCDVQRAPGQAHWLRTGWVPRRGAVHVYATLRFTMLECLSLPRAGRSCKETFTVFYYESDADTATALTPAWMENPYIKVDTVAAEHLTRKRPGAEATGKVNVKTLRLGPLSKAGFYLAFQDQGACMALLSLHLFYKKCAQLTVNLTRFPETVPRELVVPVAGSCVVDAVPAPGPSPSLYCREDGQWAEQPVTGCSCAPGFEAAEGNTKCRACAQGTFKPLSGEGSCQPCPANSHSNTIGSAVCQCRVGYFRARTDPRGAPCTTPPSAPRSVVSRLNGSSLHLEWSAPLESGGREDLTYALRCRECRPGGSCAPCGGDLTFDPGPRDLVEPWVVVRGLRPDFTYTFEVTALNGVSSLATGPVPFEPVNVTTDREVPPAVSDIRVTRSSPSSLSLAWAVPRAPSGAVLDYEVKYHEKGAEGPSSVRFLKTSENRAELRGLKRGASYLVQVRARSEAGYGPFGQEHHSQTQLDESEGWREQLALIAGTAVVGVVLVLVVIVVAVLCLRKQSNGREAEYSDKHGQYLIGHGTKVYIDPFTYEDPNEAVREFAKEIDVSYVKIEEVIGAGEFGEVCRGRLKAPGKKESCVAIKTLKGGYTERQRREFLSEASIMGQFEHPNIIRLEGVVTNSMPVMILTEFMENGALDSFLRLNDGQFTVIQLVGMLRGIASGMRYLAEMSYVHRDLAARNILVNSNLVCKVSDFGLSRFLEENSSDPTYTSSLGGKIPIRWTAPEAIAFRKFTSASDAWSYGIVMWEVMSFGERPYWDMSNQDVINAIEQDYRLPPPPDCPTSLHQLMLDCWQKDRNARPRFPQVVSALDKMIRNPASLKIVARENGGASHPLLDQRQPHYSAFGSVGEWLRAIKMGRYEESFAAAGFGSFELVSQISAEDLLRIGVTLAGHQKKILASVQHMKSQAKPGTPGGTGGPAPQY

SEQ ID NO: 25 - protein, 987 aa, mouse
MELRALLCWASLATALEETLLNTKLETADLKWVTYPQAEGQWEELSGLDEEQHSVRTYEVCDMKRPGGQAHWLRTGWVPRRGAVHVYATIRFTMMECLSLPRASRSCKETFTVFYYESEADTATAHTPAWMENPYIKVDTVAAEHLTRKRPGAEATGKVNIKTLRLGPLSKAGFYLAFQDQGACMALLSLHLFYKKCSWLITNLTYFPETVPRELVVPVAGSCVANAVPTANPSPSLYCREDGQWAEQQVTGCSCAPGYEAAESNKVCRACGQGTFKPQIGDESCLPCPANSHSNNIGSPVCLCRIGYYRARSDPRSSPCTTPPSAPRSVVHHLNGSTLRLEWSAPLESGGREDLTYAVRCRECRPGGSCLPCGGDMTFDPGPRDLVEPWVAIRGLRPDVTYTFEVAALNGVSTLATGPPPFEPVNVTTDREVPPAVSDIRVTRSSPSSLILSWALPRAPSGAVLDYEVKYHEKGAEGPSSVRFLKTSENRAELRGLKRGASYLVPVRARSEAGYGPFGQEHHSQTQLDESESWREQLALIAGTAVVGVVLVLVVVIIAVLCFRKQSYGREVEYSDKHGQYLIGHGTKVYIDPFTYEDPNEAVREFAKEIDVSYVKIEEVIGAGEFGEVCRGRLKAPGKKESCVAIKTLKGGYTERQRREFLSEASIMGQFEHPNIIRLEGVVTNSVPVMILTEFMENGALDSFLRLNDGQFTVIQLVGMLRGIASGMRYLAEMSYVHRDLAARNILVNSNLVCKVSDFGLSRFLEENSSDPTYTSSLGGKIPIRWTAPEAIAFRKFTSASDAWSYGIVMWEVMSFGERPYWDMSNQDVINAIEQDYRLPPPPDCPTSLHQLMLDCWQKDRNARPRFPQVVSALDKMIRNPASLKIVARENGGASHPLLDQRQPHYSAFGSVGEWLRAIKMGRYEESFAAAGFGSFEVVSQISAEDLLRIGVTLAGHQKKILASVQHMKSQAKPGAPGGTGGPAQQF

SEQ ID NO: 26 - protein, 989 aa, rat
MELRALLCWASLATALEETLLNTKLETADLKWVTYPQAEGQWEELSGLDEEQHSVRTYEVCDMKRPGGQAHWLRTGWVPRRGAVHVYATIRFTMMECLSLPRASRSCKETFTVFYYESEADTATAHTPAWMENPYIKVDTVAAEHLTRKRPGAEATGKVNIKTLRLGPLSKAGFYLAFQDQGACMALLSLHLFYKKCSRLVTNLTYFPETVPRELVVPVAGSCVANAVPTASPSPSLYCREDGQWAEQQVTGCSCAPGYEAAEGNKVCRACGQGTFKPQIGEEPCLPCPANSHSNNIGSPVCLCRIGYYRARSDPRSSPCTTPPSAPRSVVHHLNGSSLRLEWSAPLESGGREDLTYAVRCRECRPGGSCLPCGGDLTFDPGPRDLVEPWVAIRGLRPDVTYTFEVAALNGVSTLATGPPPFEPVNVTTDREVPPAVSDIRVTRSSPSSLILSWAIPRAPSGAVLDYEVKYHEKGAEGPSSVRFLKTSENRAELRGLKQGASYLVQVRARSEAGYGPFGQEHHSQTQLDESESWREQLALIAGTAVVGVVLVLVVIIIAVLCLRKQSSGREVEYSDKHGQYLIGHGTKVYIDPFTYEDPNEAVREFAKEIDVSYVKIEEVIGAGEFGEVCRGRLKAPGKKESCVAIKTLKGGYTERQRREFLSEASIMGQFEHPNIIRLEGVVTNSVPVMILTEFMENGALDSFLRNLPERGWGHGSVLVGMLRGIASGMRYLAEMSYVHRDLAARNILVNSNLVCKVSDFGLSRFLEENSSDPTYTSSLGGKIPIRWTAPEAIAFRKFTSASDAWSYGIVMWEVMSFGERPYWDMSNQDVINAIEQDYRLPPPPDCPTSLHQLMLDCWQKDRNARPRFPQVVSALDKMIRNPASLKIVARENGGASHPLLDQRQPHYSAFGSVGEWLRAIKMGRYEESFAAAGFGSFEVVSQISAEDLLRIGVTLAGHQKKILASVQHMKSQAKPGAPGGTGGPTQQF

SEQ ID NO: 27 - protein, 1006 aa, human
MVCSLWVLLLVSSVLALEEVLLDTTGETSEIGWLTYPPGGWDEVSVLDDQRRLTRTFEACHVAGAPPGTGQDNWLQTHFVERRGAQRAHIRLHFSVRACSSLGVSGGTCRETFTLYYRQAEEPDSPDSVSSWHLKRWTKVDTIAADESFPSSSSSSSSSSSAAWAVGPHGAGQRAGLQLNVKERSFGPLTQRGFYVAFQDTGACLALVAVRLFSYTCPAVLRSFASFPETQASGAGGASLVAAVGTCVAHAEPEEDGVGGQAGGSPPRLHCNGEGKWMVAVGGCRCQPGYQPARGDKACQACPRGLYKSSAGNAPCSPCPARSHAPNPAAPVCPCLEGFYRASSDPPEAPCTGPPSAPQELWFEVQGSALMLHWRLPRELGGRGDLLFNVVCKECEGRQEPASGGGGTCHRCRDEVHFDPRQRGLTESRVLVGGLRAHVPYILEVQAVNGVSELSPDPPQAAAINVSTSHEVPSAVPVVHQVSRASNSITVSWPQPDQTNGNILDYQLRYYDQAEDESHSFTLTSETNTATVTQLSPGHIYGFQVRARTAAGHGPYGGKVYFQTLPQGELSSQLPERLSLVIGSILGALAFLLLAAITVLAVVFQRKRRGTGYTEQLQQYSSPGLGVKYYIDPSTYEDPCQAIRELAREVDPAYIKIEEVIGTGSFGEVRQGRLQPRGRREQTVAIQALWAGGAESLQMTFLGRAAVLGQFQHPNILRLEGVVTKSRPLMVLTEFMELGPLDSFLRQREGQFSSLQLVAMQRGVAAAMQYLSSFAFVHRSLSAHSVLVNSHLVCKVARLGHSPQGPSCLLRWAAPEVIAHGKHTTSSDVWSFGILMWEVMSYGERPYWDMSEQEVLNAIEQEFRLPPPPGCPPGLHLLMLDTWQKDRARRPHFDQLVAAFDKMIRKPDTLQAGGDPGERPSQALLTPVALDFPCLDSPQAWLSAIGLECYQDNFSKFGLCTFSDVAQLSLEDLPALGITLAGHQKKLLHHIQLLQQHLRQQGSVEV

SEQ ID NO: 28 - protein, 1014 aa, mouse
MATEGTTGSGSRVVAGMVCSLWLLVLGSSVLALEEVLLDTTGETSEIGWLTYPPGGWDEVSVLDDQRRLTRTFEACHVAGLPPGSGQDNWLQTHFVERRGAQRAHIRLHFSVRACSSLGVSGGTCRETFTLYYRQADEPDGPDSIAAWHLKRWTKVDTIAADESFPASSSSSSWAVGPHRTGQRVGLQLNVKERSFGPLTQRGFYVAFQDTGACLALVAVKLFSYTCPSVLRAFASFPETQASGAGGASLVAAVGTCVAHAEPEEDGVGGQAGGSPPRLHCNGEGRWMVAVGGCRCQPGHQPARGDKLCQACPEGSYKALAGNVPCSPCPARSHSPDPAAPVCPCLQGFYRASSDPPEAPCTGPPSAPRELWFEVQGSALMLHWRLPQELGGRGDLLFNVVCKECGGHGEPSSGGMCRRCRDEVHFDPRQRGLTESRVLVGGLRAHVPYILEVQAVNGVSELSPDPPQAAAINVSTSHEVPSAVPVMHQVSRAANSITVSWPQPEQTNGNILDYQLRYYDQAEDESYSFTMTSETNTATVTRLSPGHIYGFQVRARTAAGHGPYGGKVYFQTLPQGELSSQLPEKLSLVIGSILGALAFLLLAAITVLAVIFQRKRRGTGYTEQLQQYSSPGLGVKYYIDPSTYDDPCQAIRELAREVDPTYIKIEEVIGAGSFGEVRRGRLQPRGRREQAVAIQALWAGGAESLKMTFLGRAALLGQFQHPNILRLEGVVTKSRPVMVLTELMELGPLDSFLRQREGQFSSLQLVAMQRGVAAAMQYLSSFAFVHRALSARSVLVNSHLVCKVARLGHSPQGSSSLLRWAAPEVITHGKYTTSSDVWSFGILMWEVMSYGERPYWDMNEQEVLNAIEQEFRLPPPPGCPPGLHLLMLDTWQKDRARRPHFDQLVAAFDKMIRKPDTLQAEGGSGDRPSQALLNPVALDFPCLDSPQAWLSAIGLECYQDNFSKFGLSTFSDVAQLSLEDLPGLGITLAGHQKKLLHNIQLLQQHLRQPGSVEV

SEQ ID NO: 29 - protein, 1013 aa, rat
MASENTAGSGSRVAGMVYSLWLLVLGPSVLALEEVLLDTTGETSEIGWLTYPPGGWDEVSVLDDQRRLTRTFEACHVAGLPPGSGQDNWLQTHFVERRGAQRAHIRLHFSVRACSSLGVSGGTCRETFTLYYRQADEPDSPDSISAWHLKRWTKVDTIAADESFPASSSSSSWAVGPHRTDQRVGLQLNVKERSFGPLTQRGFYVAFQDTGACLALVAVKLFSYTCPSVLRAFASFPETQASGAGGASLVAAVGTCVAHAEPEEDGVGGQAGGSPPRLHCNGEGRWMVAVGGCRCQPGHQPARGDKLCQACPEGSYKALPGNVPCSPCPARSHSPDPAAPVCPCLQGFYRASSDPPEAPCTGPPSAPRELWFEVQGSALMLHWRLPQELGGRGDLLFNVVCKECGGHKEPSSGGMCRRCRDEVHFDPRQRGLTESRVLVGGLRAHVPYILEVQAVNGVSELSPDPPQAAAINVSTSHEVPSAVPVMHQVSRAANSITVSWPQPEQTNGNILDYQLRYYDQAEDESHSFTMTSETNTATVTRLSPGHIYGFQVRARTAAGHGPYGGKVYFQTLPQGELSSQLPEKLSLVIGSILGALAFLLLAAITVLAVIFQRKRRGTGYTEQLQQYSSPGLGVKYYIDPSTYDDPCQAIRELAREVDPTYIKIEEVIGAGSFGEVRRGRLQPRGRREQAVAIQALWAGGAESLKMTFLGRAALLGQFQHPNILRLEGVVTRSRPVMVLTELMELGPLDSFLRQREGQFSSLQLVAMQRGVAAAMQYLSSFAFVHRALSARSVLVNSHLVCKVARLGHSPQGSSSLLRWAAPEVITHGKYTTSSDVWSFGILMWEVMSYGERPYWDMSDQEVLNAIEQEFRLPPPPGCPTGLHLLMLDTWQKDRARRPHFDQLVAAFDKMIRKPDTLQAEGSSGDRPSQALLNPVALDFPCLDSPQAWLSAIGLECYQDNFSKFGLSTFSDVAQLSLEDLPGLGITLAGHQKKLLHNIQLLQQHLRQPGSVEV

SEQ ID NO: 30 - protein, 205 aa, mouse
MEFLWAPLLGLCCSLAAADRHIVFWNSSNPKFREEDYTVHVQLNDYLDIICPHYEDDSVADAAMERYTLYMVEHQEYVACQPQSKDQVRWNCNRPSAKHGPEKLSVKFQRFTPFILGKEFKEGHSYYYISKPIYHQESQCLKLKVTVNGKITHNPQAHVNPQEKRLQADDPEVQVLHSIGYSAAPRLFPLVWAVLLLPLLLLQSQ

SEQ ID NO: 31 - protein, 205 aa, human
MEFLWAPLLGLCCSLAAADRHTVFWNSSNPKFRNEDYTIHVQLNDYVDIICPHYEDHSVADAAMEQYILYLVEHEEYQLCQPQSKDQVRWQCNRPSAKHGPEKLSEKFQRFTPFTLGKEFKEGHSYYYISKPIHQHEDRCLRLKVTVSGKITHSPQAHDNPQEKRLAADDPEVRVLHSIGHSAAPRLFPLAWTVLLLPLLLLQTP

SEQ ID NO: 32 - protein, 205 aa, rat
MEFLWAPLLGLCCSLAAADRHIVFWNSSNPKFREEDYTVHVQLNDYLDIICPHYEDDSVADAAMERYTLYMVEHQEYVTCEPQSKDQVRWKCNQPSAKHGPEKLSEKFQRFTPFTLGKEFKEGHSYYYISKPIYHQETQCLKLKVTVNGKITHSPHAHANPQEKRLQADDPEVQVLHSIGHSAAPRLFPLVWAVLLLPLLLLQTQ

SEQ ID NO: 33 - protein, 209 aa, mouse
MAPAQRPLLPLLLLLLPLRARNEDPARANADRYAVYWNRSNPRFQVSAVGDGGGYTVEVSINDYLDIYCPHYGAPLPPAERMERYILYMVNGEGHASCDHRQRGFKRWECNRPAAPGGPLKFSEKFQLFTPFSLGFEFRPGHEYYYISATPPNLVDRPCQRLKVYVRPTNETLYEAPEPIFTSNSSCSGLGGCHLFLTTVPVLWSLLGS

SEQ ID NO: 34 - protein, 213 aa, human
MAPAQRPLLPLLLLLLPLPPPPFARAEDAARANSDRYAVYWNRSNPRFHAGAGDDGGGYTVEVSINDYLDIYCPHYGAPLPPAERMEHYVLYMVNGEGHASCDHRQRGFKRWECNRPAAPGGPLKFSEKFQLFTPFSLGFEFRPGHEYYYISATPPNAVDRPCLRLKVYVRPTNETLYEAPEPIFTSNNSCSSPGGCRLFLSTIPVLWTLLGS

SEQ ID NO: 35 - protein, 204 aa, rat
  misc_feature (1)..(1): Xaa can be any naturally occurring amino acid
XPLLPLLLLLLPLRARNEDPARANADRYAVYWNRSNPRFQVSAVGDGGGYTVEVSINDYLDIYCPHYGAPLPPAERMERYILYMVNGEGHASCDHRQRGFKRWECNRPAAPGGPLKFSEKFQLFTPFSLGFEFRPGHEYYYISATPPNLVDRPCLRLKVYVRPTNETLYEAPEPIFTSNSSCSGLGGCHLFLTTVPVLWSLLGS

SEQ ID NO: 36 - protein, 206 aa, mouse
MRLLPLLRTVLWAALLGSRLPGCSSLRHPIYWNSSNPRLLRGDAVVELGFNDYLDIFCPHYESPGPPEGPETFALYMVDWSGYEACTAEGANAFQRWNCSMPFAPFSPVRFSEKIQRYTPFPLGFEFLPGETYYYISVPTPESPGRCLRLQVSVCCKESGSSHESAHPVGSPGESGTSGWRGGHAPSPLCLLLLLLLPILRLLRVL

SEQ ID NO: 37 - protein, 201 aa, human
MRLLPLLRTVLWAAFLGSPLRGGSSLRHVVYWNSSNPRLLRGDAVVELGLNDYLDIVCPHYEGPGPPEGPETFALYMVDWPGYESCQAEGPRAYKRWVCSLPFGHVQFSEKIQRFTPFSLGFEFLPGETYYYISVPTPESSGQCLRLQVSVCCKERKSESAHPVGSPGESGTSGWRGGDTPSPLCLLLLLLLLILRLLRIL

SEQ ID NO: 38 - protein, 204 aa, rat
MRLLPLLRTVLWAALLGSRLRGCSSLRHSIYWNSTNPRLLRGDAVVELGLNDYLDIFCPHYESPGPPEGPETFALYIVDWSGYEACKAEGANAFQRWNCTLPFAPFVPVRFSEKIQRFTPFPLGFEFLPGETYYYISVPTPESPGQCLRLQVSVCCKEDRSESAHPVGSPGESGTSGWRGGHAPSPLSLLLLLLLPILRLLRVL

SEQ ID NO: 39 - protein, 228 aa, human
MLHVEMLTLVFLVLWMCVFSQDPGSKAVADRYAVYWNSSNPRFQRGDYHIDVCINDYLDVFCPHYEDSVPEDKTERYVLYMVNFDGYSACDHTSKGFKRWECNRPHSPNGPLKFSEKFQLFTPFSLGFEFRPGREYFYISSAIPDNGRRSCLKLKVFVRPTNSCMKTIGVHDRVFDVNDKVENSLEPADDTVHESAEPSRGENAAQTPRIPSRLLAILLFLLAMLLTL

SEQ ID NO: 40 - protein, 228 aa, mouse
MLHVEMLTLLFLVLWMCVFSQDPGSKVVADRYAVYWNSSNPRFQRGDYHIDVCINDYLDVFCPHYEDSVPEDKTERYVLYMVNFDGYSACDHTSKGFKRWECNRPHSPNGPLKFSEKFQLFTPFSLGFEFRPGREYFYISSAIPDNGRRSCLKLKVFVRPTNSCMKTIGVHDRVFDVNDKVENSLEPADDTVHESAEPSRGENAAQTPRIPSRLLAILLFLLAMLLTL

SEQ ID NO: 41 - protein, 228 aa, rat
MLHVEMLTLLFLVLWMCVFSQDPGSKVVADRYAVYWNSSNPRFQRGDYHIDVCINDYLDVFCPHYEDSVPEDKTERYVLYMVNFDGYSACDHTSKGFKRWECNRPHSPNGPLKFSEKFQLFTPFSLGFEFRPGREYFYISSAIPDNGRRSCLKLKVFVRPTNSCMKTIGVRDRVFDVNDKVENSLEPADDTVHESAEPSRGENAAQTPRIPSRLLAILLFLLAMLLTL

SEQ ID NO: 42 - protein, 336 aa, mouse
MAMARSRRDSVWKYCWGLLMVLCRTAISRSIVLEPIYWNSSNSKFLPGQGLVLYPQIGDKLDIICPKVDSKTVGQYEYYKVYMVDKDQADRCTIKKENTPLLNCARPDQDVKFTIKFQEFSPNLWGLEFQKNKDYYIISTSNGSLEGLDNQEGGVCQTRAMKILMKVGQDASSAGSARNHGPTRRPELEAGTNGRSSTTSPFVKPNPGSSTDGNSAGHSGNNLLGSEVALFAGIASGCIIFIVIIITLVVLLLKYRRRHRKHSPQHTTTLSLSTLATPKRGGNNNGSEPSDVIIPLRTADSVFCPHYEKVSGDYGHPVYIVQEMPPQSPANIYYKV

SEQ ID NO: 43 - protein, 333 aa, human
MAVRRDSVWKYCWGVLMVLCRTAISKSIVLEPIYWNSSNSKFLPGQGLVLYPQIGDKLDIICPKVDSKTVGQYEYYKVYMVDKDQADRCTIKKENTPLLNCAKPDQDIKFTIKFQEFSPNLWGLEFQKNKDYYIISTSNGSLEGLDNQEGGVCQTRAMKILMKVGQDASSAGSTRNKDPTRRPELEAGTNGRSSTTSPFVKPNPGSSTDGNSAGHSGNNILGSEVALFAGIASGCIIFIVIIITLVVLLLKYRRRHRKHSPQHTTTLSLSTLATPKRSGNNNGSEPSDIIIPLRTADSVFCPHYEKVSGDYGHPVYIVQEMPPQSPANIYYKV

SEQ ID NO: 44 - protein, 355 aa, rat
MAMARSRRDSVWKYCWGLLMVLCRTAISRSIVLEPIYWNSSNSKFLPGQGLVLYPQIGDKLDIICPKVDSKTVGQYEYYKVYMVDKEQADRCTIKKENTPLLNCARPDQDVKFTIKFQEFSPNLWGLEFQKNKDYYIISTSNGSLEGLDNQEGGVCQTRAMKILMKVGQDASSAGSTRNNDPTRRPELEAGTNGRSSTTSPFVKPNPGTPQGKPRTLVTGSSCSCAGSSTDGNSAGHSGNNLLGSEVALFAGIASGCIIFIVIIITLVVLLLKYRRRHRKHSPQHTTTLSLSTLATPKRGGNNNGSEPSDVIIPLRTADSVFCPHYEKVSGDYGHPVYIVQEMPPQSPANIYYKV

SEQ ID NO: 45 - protein, 340 aa, human
MGPPHSGPGGVRVGALLLLGVLGLVSGLSLEPVYWNSANKRFQAEGGYVLYPQIGDRLDLLCPRARPPGPHSSPNYEFYKLYLVGGAQGRRCEAPPAPNLLLTCDRPDLDLRFTIKFQEYSPNLWGHEFRSHHDYYIIATSDGTREGLESLQGGVCLTRGMKVLLRVGQSPRGGAVPRKPVSEMPMERDRGAAHSLEPGKENLPGDPTSNATSRGAEGPLPPPSMPAVAGAAGGLALLLLGVAGAGGAMCWRRRRAKPSESRHPGPGSFGRGGSLGLGGGGGMGPREAEPGELGIALRGGGAADPPFCPHYEKVSGDYGHPVYIVQDGPPQSPPNIYYKV

SEQ ID NO: 46 - protein, 340 aa, mouse
MGAPHFGPGGVQVGALLLLGFAGLVSGLSLEPVYWNSANKRFQAEGGYVLYPQIGDRLDLLCPRARPPGPHSSPSYEFYKLYLVEGAQGRRCEAPPAPNLLLTCDRPDLDLRFTIKFQEYSPNLWGHEFRSHHDYYIIATSDGTREGLESLQGGVCLTRGMKVLLRVGQSPRGGAVPRKPVSEMPMERDRGAAHSAEPGRDTIPGDPSSNATSRGAEGPLPPPSMPAVAGAAGGMALLLLGVAGAGGAMCWRRRRAKPSESRHPGPGSFGRGGSLGLGGGGGMGPREAEPGELGIALRGGGTADPPFCPHYEKVSGDYGHPVYIVQDGPPQSPPNIYYKV

SEQ ID NO: 47 - protein, 340 aa, rat
MGGPHFGPGGVQVGALLLLGFAGLVSGLSLEPVYWNSANKRFQAEGGYVLYPQIGDRLDLLCPRARPPGPHSSPSYEFYKLYLVGGAQGRRCEAPPAPNLLLTCDRPDLDLRFTIKFQEYSPNLWGHEFRSHHDYYIIATSDGTREGLESLQGGVCLTRGMKVLLRVGQSPRGGAVPRKPVSEMPMERDRGAAHSQEPGKDSIPGDPNSNATSRGAEGPLPPPSMPAVAGAAGGLALLLLGVAGAGGAMCWRRRRAKPSESRHPGPGSFGRGGSLGLGGGGGMGPREAEPGELGIALRGGGAADPPFCPHYEKVSGDYGHPVYIVQDGPPQSPPNIYYKV

SEQ ID NO: 48 - protein, 112 aa, human
MAEQATKSVLFVCLGNICRSPIAEAVFRKLVTDQNISENWRVDSAATSGYEIGNPPDYRGQSCMKRHGIPMSHVARQVPSLDLKLCVLCFSGSLTAVLFLTGTWAGPQTQEL

SEQ ID NO: 49 - protein, 158 aa, human
MAEQATKSVLFVCLGNICRSPIAEAVFRKLVTDQNISENWVIDSGAVSDWNVGRSPDPRAVSCLRNHGIHTAHKARQITKEDFATFDYILCMDESNLRDLNRKSNQVKTCKAKIELLGSYDPQKQLIIEDPYYGNDSDFETVYQQCVRCCRAFLEKAH

SEQ ID NO: 50 - protein, 158 aa, human
MAEQATKSVLFVCLGNICRSPIAEAVFRKLVTDQNISENWRVDSAATSGYEIGNPPDYRGQSCMKRHGIPMSHVARQITKEDFATFDYILCMDESNLRDLNRKSNQVKTCKAKIELLGSYDPQKQLIIEDPYYGNDSDFETVYQQCVRCCRAFLEKAH

SEQ ID NO: 51 - protein, 158 aa, mouse
MAEVGSKSVLFVCLGNICRSPIAEAVFRKLVTDEKVSDNWRIDSAATSTYEVGNPPDYRGQNCMRKHGIHMQHIARQITKEDFATFDYILCMDESNLRDLNRKSNQVKNCKAKIELLGSYDPQKQLIIEDPYYGNDSDFEVVYQQCLRCCKAFLEKTY

SEQ ID NO: 52 - protein, 158 aa, rat
MAEVGSKSVLFVCLGNICRSPIAEAVFRKLVTDENVSDNWRIDSAATSTYEVGNPPDYRGQNCMKKHGIHMQHIARQITREDFATFDYILCMDESNLRDLNRKSNQVKNCKAKIELLGSYDPQKQLIIEDPYYGNDSDFEVVYQQCLRCCKAFLEKTH

SEQ ID NO: 53 - protein, 1216 aa, human
MGHLPTGIHGARRLLPLLWLFVLFKNATAFHVTVQDDNNIVVSLEASDVISPASVYVVKITGESKNYFFEFEEFNSTLPPPVIFKASYHGLYYIITLVVVNGNVVTKPSRSITVLTKPLPVTSVSIYDYKPSPETGVLFEIHYPEKYNVFTRVNISYWEGKDFRTMLYKDFFKGKTVFNHWLPGMCYSNITFQLVSEATFNKSTLVEYSGVSHEPKQHRTAPYPPQNISVRIVNLNKNNWEEQSGNFPEESFMRSQDTIGKEKLFHFTEETPEIPSGNISSGWPDFNSSDYETTSQPYWWDSASAAPESEDEFVSVLPMEYENNSTLSETEKSTSGSFSFFPVQMILTWLPPKPPTAFDGFHIHIEREENFTEYLMVDEEAHEFVAELKEPGKYKLSVTTFSSSGSCETRKSQSAKSLSFYISPSGEWIEELTEKPQHVSVHVLSSTTALMSWTSSQENYNSTIVSVVSLTCQKQKESQRLEKQYCTQVNSSKPIIENLVPGAQYQVVIYLRKGPLIGPPSDPVTFAIVPTGIKDLMLYPLGPTAVVLSWTRPYLGVFRKYVVEMFYFNPATMTSEWTTYYEIAATVSLTASVRIANLLPAWYYNFRVTMVTWGDPELSCCDSSTISFITAPVAPEITSVEYFNSLLYISWTYGDDTTDLSHSRMLHWMVVAEGKKKIKKSVTRNVMTAILSLPPGDIYNLSVTACTERGSNTSMLRLVKLEPAPPKSLFAVNKTQTSVTLLWVEEGVADFFEVFCQQVGSSQKTKLQEPVAVSSHVVTISSLLPATAYNCSVTSFSHDSPSVPTFIAVSTMVTEMNPNVVVISVLAILSTLLIGLLLVTLIILRKKHLQMARECGAGTFVNFASLERDGKLPYNWRRSIFAFLTLLPSCLWTDYLLAFYINPWSKNGLKKRKLTNPVQLDDFDAYIKDMAKDSDYKFSLQFEELKLIGLDIPHFAADLPLNRCKNRYTNILPYDFSRVRLVSMNEEEGADYINANYIPGYNSPQEYIATQGPLPETRNDFWKMVLQQKSQIIVMLTQCNEKRRVKCDHYWPFTEEPIAYGDITVEMISEEEQDDWACRHFRINYADEMQDVMHFNYTAWPDHGVPTANAAESILQFVHMVRQQATKSKGPMIIHCSAGVGRTGTFIALDRLLQHIRDHEFVDILGLVSEMRSYRMSMVQTEEQYIFIHQCVQLMWMKKKQQFCISDVIYENVSKS

SEQ ID NO: 54 - protein, 1188 aa, human
MGHLPTGIHGARRLLPLLWLFVLFKNATAFHVTVQDDNNIVVSLEASDVISPASVYVVKITGESKNYFFEFEEFNSTLPPPVIFKASYHGLYYIITLVVVNGNVVTKPSRSITVLTKPLPVTSVSIYDYKPSPETGVLFEIHYPEKYNVFTRVNISYWEGKDFRTMLYKDFFKGKTVFNHWLPGMCYSNITFQLVSEATFNKSTLVEYSGVSHEPKQHRTAPYPPQNISVRIVNLNKNNWEEQSGNFPEESFMRSQDTIGKEKLFHFTEETPEIPSGNISSGWPDFNSSDYETTSQPYWWDSASAAPESEDEFVSVLPMEYENNSTLSETEKSTSGSFSFFPVQMILTWLPPKPPTAFDGFHIHIEREENFTEYLMVDEEAHEFVAELKEPGKYKLSVTTFSSSGSCETRKSQSAKSLSFYISPSGEWIEELTEKPQHVSVHVLSSTTALMSWTSSQENYNSTIVSVVSLTCQKQKESQRLEKQYCTQVNSSKPIIENLVPGAQYQVVIYLRKGPLIGPPSDPVTFAIVPTGIKDLMLYPLGPTAVVLSWTRPYLGVFRKYVVEMFYFNPATMTSEWTTYYEIAATVSLTASVRIANLLPAWYYNFRVTMVTWGDPELSCCDSSTISFITAPVAPEITSVEYFNSLLYISWTYGDDTTDLSHSRMLHWMVVAEGKKKIKKSVTRNVMTAILSLPPGDIYNLSVTACTERGSNTSMLRLVKLEPAPPKSLFAVNKTQTSVTLLWVEEGVADFFEVFCQQVGSSQKTKLQEPVAVSSHVVTISSLLPATAYNCSVTSFSHDSPSVPTFIAVSTMVTEMNPNVVVISVLAILSTLLIGLLLVTLIILRKKHLQMARECGAGTFVNFASLERDGKLPYNWSKNGLKKRKLTNPVQLDDFDAYIKDMAKDSDYKFSLQFEELKLIGLDIPHFAADLPLNRCKNRYTNILPYDFSRVRLVSMNEEEGADYINANYIPGYNSPQEYIATQGPLPETRNDFWKMVLQQKSQIIVMLTQCNEKRRVKCDHYWPFTEEPIAYGDITVEMISEEEQDDWACRHFRINYADEMQDVMHFNYTAWPDHGVPTANAAESILQFVHMVRQQATKSKGPMIIHCSAGVGRTGTFIALDRLLQHIRDHEFVDILGLVSEMRSYRMSMVQTEEQYIFIHQCVQLMWMKKKQQFCISDVIYENVSKS

SEQ ID NO: 55 - protein, 405 aa, human
MVTEMNPNVVVISVLAILSTLLIGLLLVTLIILRKKHLQMARECGAGTFVNFASLERDGKLPYNWRRSIFAFLTLLPSCLWTDYLLAFYINPWSKNGLKKRKLTNPVQLDDFDAYIKDMAKDSDYKFSLQFEELKLIGLDIPHFAADLPLNRCKNRYTNILPYDFSRVRLVSMNEEEGADYINANYIPGYNSPQEYIATQGPLPETRNDFWKMVLQQKSQIIVMLTQCNEKRRVKCDHYWPFTEEPIAYGDITVEMISEEEQDDWACRHFRINYADEMQDVMHFNYTAWPDHGVPTANAAESILQFVHMVRQQATKSKGPMIIHCSAGVGRTGTFIALDRLLQHIRDHEFVDILGLVSEMRSYRMSMVQTEEQYIFIHQCVQLMWMKKKQQFCISDVIYENVSKS

SEQ ID NO: 56 - protein, 377 aa, human
MVTEMNPNVVVISVLAILSTLLIGLLLVTLIILRKKHLQMARECGAGTFVNFASLERDGKLPYNWSKNGLKKRKLTNPVQLDDFDAYIKDMAKDSDYKFSLQFEELKLIGLDIPHFAADLPLNRCKNRYTNILPYDFSRVRLVSMNEEEGADYINANYIPGYNSPQEYIATQGPLPETRNDFWKMVLQQKSQIIVMLTQCNEKRRVKCDHYWPFTEEPIAYGDITVEMISEEEQDDWACRHFRINYADEMQDVMHFNYTAWPDHGVPTANAAESILQFVHMVRQQATKSKGPMIIHCSAGVGRTGTFIALDRLLQHIRDHEFVDILGLVSEMRSYRMSMVQTEEQYIFIHQCVQLMWMKKKQQFCISDVIYENVSKS

SEQ ID NO: 57 - protein, 1226 aa, mouse
MGHLPRGTLGGRRLLPLLGLFVLLKIVTTFHVAVQDDNNIVVSLEASDIVSPASVYVVRVAGESKNYFFEFEEFNSTLPPPVVFKATYHGLYYIITLVVVNGNVVTKPSRSITVLTKPLPVTSVSIYDYKPSPETGVLFEIHYPEKYNVFSRVNISYWEGRDFRTMLYKDFFKGKTVFNHWLPGLCYSNITFQLVSEATFNKSTLVEYSGVSHEPKQHRTAPYPPRNISVRFVNLNKNNWEEPSGSFPEDSFIKPPQDSIGRDRRFHFPEETPETPPSNVSSGSPPSNVSSAWPDPNSTDYESTSQPFWWDSASAAPENEEDFVSALPADYDTETTLDRTEKPTADPFSAFPVQMTLSWLPPKPPTAFDGFNILIEREENFTDYLTVDEEAHEFVAELKEPGKYKLSVTTFSSSGACETRKSQSAKSLSFYISPTGEWIEELTEKPQHVSVHVLSSTTALMSWTSSQENYNSTIVSVVSLTCQKQKESQRLEKQYCTQVNSSKPVIENLVPGAQYQVVMYLRKGPLIGPPSDPVTFAIVPTGIKDLMLYPLGPTAVVLSWTRPILGVFRKYVVEMFYFNPTTMTSEWTTYYEIAATVSLTASVRIASLLPAWYYNFRVTMVTWGDPELSCCDSSTISFITAPVAPEITSVEYFNSLLYISWTYGDATTDLSHSRMLHWMVVAEGRKKIKKSVTRNVMTAILSLPPGDIYNLSVTACTERGSNTSLPRLVKLEPAPPKSLFAVNKTQTSVTLLWVEEGVADFFEVFCQQLGSGHNGKLQEPVAVSSHVVTISSLLPATAYNCSVTSFSHDTPSVPTFIAVSTMVTEVNPNVVVISVLAILSTLLIGLLLVTLVILRKKHLQMARECGAGTFVNFASLEREGKLPYSWRRSVFALLTLLPSCLWTDYLLAFYINPWSKNGLKKRKLTNPVQLDDFDSYIKDMAKDSDYKFSLQFEELKLIGLDIPHFAADLPLNRCKNRYTNILPYDFSRVRLVSMNEEEGADYINANYIPGYNSPQEYIATQGPLPETRNDFWKMVLQQKSHIIVMLTQCNEKRRVKCDHYWPFTEEPIAYGDITVEMVSEEEEEDWASRHFRINYADEAQDVMHFNYTAWPDHGVPPANAAESILQFVFTVRQQAAKSKGPMIIHCSAGVGRTGTFIALDRLLQHIRDHEFVDILGLVSEMRSHRMSMVQTEEQYIFIHQCVQLMWLRKKQQFCISDVIYENVSKS

SEQ ID NO: 58 - protein, 1216 aa, rat
MGHLPRERRGGRRLLPLLGLFVLLKIVSTFHVTVRDDNNIVVSLEASDVVSPTSVYVVRVAGESKNYFFEFEESNGTLPPPVVFKATYHGLYYIISLVVVSGNVVTKPSRSITVLTKPLPVTSVSIYDYKPSPETGVLFEIHYPEKYNVFSRVNISYWEGKDFRTMLYKDFLKGKTVFNHWLPGICYSNITFQLVSEATFNKSTLVECSGVSHEPKQHRTAPYPPRNISVRFVNLNKNNWEEPSGSFPEDSFIKPQDAIGRDRPFHFPEETPETPASNASSGWPDPNGTEYESTSQPYWWDSASAAPENEEDFVSVLPADYDTEATLGRTEKPTADPFSAFPVQMTLSWLPPKPPTAFDGFNILIEREGNFTDYLTVDEEAHEFVAELKEPGKYRLSVTTFSSSGACETRKSQSAKSLSFYISPTGEWIEELTEKPQHVSVHVLSSTTALLSWTSSQENYNSTIVSVVSLTCQKQKESQRLEKQYCTQVNSSKPVIENLVPGAQYQVVMYLRKGPLIGPPSDPVTFAIVPTGIKDLMLYPLGPTAVVLSWTRPYLGVFRKYVVEMFYFNPTTMTSEWTTYYEIAATVSLTSSVRIANLLPAWYYNFRVTMVTWGDPELSCCDSSTISFITAPVAPEITSVEYFNSLLYISWTYGDATTDLSHSRMLHWMVVAEGRRKIKKSVTRNVMTAILSLPPGDIYNLSVTACTERGSNTSMLRLVKLEPAPPKSLFAVNKTQTSVTLLWVEEGVADFFEVLCQKLGSGHDGKLQEPVAVSSHVVTISSLLPATAYNCSVTSFSHDSPSVPTFIAVSTMVTEVNPNVVVISVLAILSILLIGLLLVTLVILRKKHLQMARECGAGTFVNFASLEREGKLPYSWRRSVFTFLTLLPSCLWTDYLLAFYINPWSKNGLKKRKLTNPVQLDDFDSYIKDMAKDSDYKFSLQFEELKLIGLDIPHFAADLPLNRCKNRYTNILPYDFSRVRLVSMNEEEGADYINANYIPGYNSPQEYIATQGPLPETRNDFWKMVLQQKSRIIVMLTQCNEKRRVKCDHYWPFTEEPIAYGDITVEMVSEEEQEDWASRHFRINYADEAQDVMHFNYTAWPDHGVPPANAAESILQFVYTVRQQATKSKGPMIIHCSAGVGRTGTFIALDRLLQHIRDHEFVDILGLVSEMRSYRMSMVQTEEQYIFIHQCVQLMWLKKKQQFCISDVIYENVSKS

SEQ ID NO: 59 - DNA, 3367 bp, human
gcccccgcccggcccgccccgctctcctagtcccttgcaacctggcgctgccatccgggccactgtcccaggtcccggcccggagctatggagcggcgctggcccctggggctagggctggtgctgctgctctgcgccccgctgcccccgggggcgcgcgccaaggaagttactctgatggacacaagcaaggcacagggagagctgggctggctgctggatcccccaaaagatgggtggagtgaacagcaacagatactgaatgggacacccctgtacatgtaccaggactgcccaatgcaaggacgcagagacactgaccactggcttcgctccaattggatctaccgcggggaggaggcttcccgcgtccacgtggagctgcagttcaccgtgcgggactgcaagagtttccctgggggagccgggcctctgggctgcaaggagaccttcaaccttctgtacatggagagtgaccaggatgtgggcattcagctccgacggcccttgttccagaaggtaaccacggtggctgcagaccagagcttcaccattcgagaccttgcgtctggctccgtgaagctgaatgtggagcgctgctctctgggccgcctgacccgccgtggcctctacctcgctttccacaacccgggtgcctgtgtggccctggtgtctgtccgggtcttctaccagcgctgtcctgagaccctgaatggcttggcccaattcccagacactctgcctggccccgctgggttggtggaagtggcggggacctgcttgccccacgcgcgggccagccccaggccctcaggtgcaccccgcatgcactgcagccctgatggcgagtggctggtgcctgtaggacggtgccactgtgagcctggctatgaggaaggtggcagtggcgaagcatgtgttgcctgccctagcggctcctaccggatggacatggacacaccccattgtctcacgtgcccccagcagagcactgctgagtctgagggggccaccatctgtacctgtgagagcggccattacagagctcccggggagggcccccaggtggcatgcacaggtcccccctcggccccccgaaacctgagcttctctgcctcagggactcagctctccctgcgttgggaacccccagcagatacggggggacgccaggatgtcagatacagtgtgaggtgttcccagtgtcagggcacagcacaggacggggggccctgccagccctgtggggtgggcgtgcacttctcgccgggggcccgggggctcaccacacctgcagtgcatgtcaatggccttgaaccttatgccaactacacctttaatgtggaagcccaaaatggagtgtcagggctgggcagctctggccatgccagcacctcagtcagcatcagcatggggcatgcagagtcactgtcaggcctgtctctgagactggtgaagaaagaaccgaggcaactagagctgacctgggcggggtcccggccccgaagccctggggcgaacctgacctatgagctgcacgtgctgaaccaggatgaagaacggtaccagatggttctagaacccagggtcttgctgacagagctgcagcctgacaccacatacatcgtcagagtccgaatgctgaccccactgggtcctggccctttctcccctgatcatgagtttcggaccagcccaccagtgtccaggggcctgactggaggagagattgtagccgtcatctttgggctgctgcttggtgcagccttgctgcttgggattctcgttttccggtccaggagagcccagcggcagaggcagcagaggcagcgtgaccgcgccaccgatgtggatcgagaggacaagctgtggctgaagccttatgtggacctccaggcatacgaggaccctgcacagggagccctggactttacccgggagcttgatccagcgtggctgatggtggacactgtcataggagaaggagagtttggggaagtgtatcgagggaccctgaggctccccagccaggactgcaagactgtggccattaagaccttaaaagacacatccccaggtggccagtggtggaacttccttcgagaggcaactatcatgggccagtttagccacccgcatattctgcatctggaaggcgtcgtcacaaagcgaaagccgatcatgatcatcacagaatttatggagaatggagccctggatgccttcctgagggagcgggaggaccagctggtccctgggcagctagtggccatgctgcagggcatagcatctggcatgaactacctcagtaatcacaattatgtccaccgggacctggctgccagaaacatcttggtgaatcaaaacctgtgctgcaaggtgtctgactttggcctgactcgcctcctggatgactttgatggcacatacgaaacccagggaggaaagatccctatccgttggacagcccctgaagccattgcccatcggatcttcaccacagccagcgatgtgtggagctttgggattgtgatgtgggaggtgctgagctttggggacaagccttatggggagatgagcaatcaggaggttatgaagagcattgaggatgggtaccggttgccccctcctgtggactgccctgcccctctgtatgagctcatgaagaactgctgggcatatgaccgtgcccgccggccacacttccagaagcttcaggcacatctggagcaactgcttgccaacccccactccctgcggaccattgccaactttgaccccaggatgactcttcgcctgcccagcctgagtggctcagatgggatcccatatcgaaccgtctctgagtggctcgagtccatacgcatgaaacgctacatcctgcacttccactcggctgggctggacaccatggagtgtgtgctggagctgaccgctgaggacctgacgcagatgggaatcacactgcccgggcaccagaagcgcattctttgcagtattcagggattcaaggactgatccctcctctcaccccatgcccaatcagggtgcaaggagcaaggacggggccaaggtcgctcatggtcactccctgcgccccttcccacaacctgccagactaggctatcggtgctgcttctgcccactttcaggagaaccctgctctgcaccccagaaaacctctttgttttaaaagggaggtgggggtagaagtaaaaggatgatcatgggagggagctgaggggttaatatatatacatacatacacatatatatatttttgtaaataaacaggaactgattttctgcctccatcccacccatgagggctgcaggcactacaaaagagctgactactgagaaaaaa

SEQ ID NO: 60 - DNA, 3275 bp, mouse
gagtccctcgcgacctggcccagccgtgagggccgtggtcccaggtcccggccggcgccatggagcggcgctggcccctggggcttgcattgctgctgctgctgctctgcgccccgctgcccccgggggcgcgcgccgaggaagtcactctaatggacacaagcacagcacaaggagagctgggctggcttctggatcccccagagactgggtggagtgaggtgcaacaaatgctaaacgggacacccctgtacatgtaccaagactgcccaatacaggaaggtggggacactgaccactggcttcgctccaattggatctaccgcggagaggaagcttcacgcatctacgtggagctgcagttcaccgtgcgggactgtaagagtttcccagggggagctgggcctctgggatgcaaagagaccttcaaccttttctacatggagagtgaccaggatgtgggcattcagctccgacgacctttgttccaaaaggtaacaactgtggcagcagaccagagcttcaccatcagagacctggcatctggctctgtaaagctgaatgtagaacgctgctcgttgggccacctcacccgccgtggcctctacttagctttccacaacccgggttcctgtgtggcgctagtgtctgtaagggtgttctaccagcgctgtgccgagaccgtgcatggcttggcccacttccctgacactctccctggacctggagggttggttgaagtagctggaacgtgcctctcccatgcacagatcagcttggggtcctcaggtacaccacgaatgcactgcagccctgatggcgagtggctggtgcctgtgggtcagtgccagtgcgagcctggctatgaagaaagcagtggaaatgtgggatgcactgcctgtcctactggtttctatcgagtggacatgaatacactccgttgtctcaagtgcccccaacatagcatagcagagtctgaggggtctaccatctgtacctgtgagaatggacattatcgagcccctggggagggtccccaggtagcatgcacacgtcccccatcggctccccaaaatctgagcttctccacatcagggactcaactctccctgcgctgggagccccccagagatacagggggacgccatgatatcagatacagcgtggagtgcttgcagtgtcggggcattgcacaggatgggggtccctgccaaccctgtggaaaaggtgtgcacttttccccggctgcttccgggctcaccacatctaccgtgcaagtgcaaggcctcgagccttacgccaactacacatttaccgtcaaatcccaaaacagagtgtcaggactggacagttccagccctagcagcgcctccctcagtatcaacatggggcacgcagagtcactctctggcctgtcactgaagctggtgaagaaagaaccgaggcagctggagctgacttgggcagggtcccgaccccgaaatcctggagggaatctgagctatgagctgcacgtgctgaatcaggacgaagaatggcaccagatggtgttggaacccagggtcttgctgacaaaacttcagccagataccacatacattgtcagagtgcgaacactgaccccactggggcctggccctttctcccctgaccatgagtttcggacaagcccaccagtttccagaagcctgaccggaggagagattgtggccgtcatctttggattgctgcttggaatagctctgctgatcgggatttatgtcttccgttcaaggagaggccagagacagagacagcagaggcagcgtgaacgcaccaccaatgtcgatcgagaggacaagctgtggctaaaaccctatgtggacctccaggcctatgaggaccctgcacagggagccttagactttgcccaggaactggacccagcctggctgattgtggacactgtcataggagaaggggagtttggtgaagtgtatcggggagccctgagactccccagccaagattgcaagactgtggccattaagaccttgaaagatacatccccagatggctactggtggaatttccttcgagaggcaactatcatgggccagttcaaccacccacacattctacgcctagaaggtgtcatcacaaaaagaaagcccatcatgatcatcacagaatttatggaaaatggagccctggatgcctttctgaaggaacgggaggaccaactagctcctggtcagctagtggctatgctactgggcatagcatcaggcatgaactgcctcagtggccacaattatgtccatagagacctggctgccaggaacatcttggtgaatcagaacctgtgctgcaaggtgtctgactttggcttgacccgcctcctggatgactttgacggcacctatgaaacccagggaggaaagatccccatccgatggacagccccagaagctattgcccatcggatcttcaccacagccagtgatgtgtggagctttgggattgtaatgtgggaggtgttgagttttggcgacaaaccctatggggagatgagcaaccaagaggtaatgaaaagcattgaagatgggtaccggttgccccctcctgtggactgtcctgcccctctctatgaactcatgaagaactgctgggcttacgatcgtgcccgtcgaccccacttcctccagctgcaggcacatctggaacagttgcttactgacccccattccctaaggacaattgccaactttgaccctagggtgaccttacgcctgcccagcctgagtggctctgatgggatcccttatcgaagtgtctctgagtggcttgaatccatacgcatgaagcgctacatcctgcacttccgttcggctgggctggacaccatggagtgtgtgctggagctgacggctgaggacctgacgcagatgggaataacgttgccagggcaccagaaacgaattctctgcagtattcaaggatttaaggactgagcatccactgaaaagatgctccagccctctgcctgcctccattagcaaggacggggctacagtcaactccctgggcctttcctcagcctacgaaatgtaggctattggtgctgctcctgcccagtcaatcagaactctgcctttgaaccaaggagcctttgtttataaagggggtggatgggtacaagtgaaggggactgtgggtgggttctgggggagggtttaatatatacacttacatatgcattatctatttttgtaaataaacaagagttgagtttg

SEQ ID NO: 61 - DNA, 3884 bp, rat
cagtccctcgcgacctggcccagccgtaggggccgtggtcccaggtcccggccggcgccatggagcggcgctggcccctggggctcgcactgctgctgctgctgctctgcgccccgctgcccccgggggcgcgcgccgaggaagtcactttaatggacacgagcacagcacaaggagagttgggctggcttctggatcccccagagactgggtggagtgaggtgcaacaaatgctgaacgggacacccctgtacatgtaccaagactgcccaatacaggaaggtggagatactgaccactggcttcgctccaactggatctaccgaggagaggaagcctcacgtgtccacgtagagctgcagttcactgtgcgggactgtaaaagtttcccagggggagctgggcctctgggatgcaaagagaccttcaaccttttctacatggagagtgaccaggatgtgggcattcaactccgacggcctttgttccaaaaggtaacaactgtggcagcagaccagagcttcaccatcagagacctggcctctggctctgtaaagctgaacgtagagcactgctccttgggtcacctcacccgccgtggtctctacctagctttccacaacccgggatcctgtgtggcgctcgtatctgtaagggtgttctaccagcgctgcgcagagactgtgcatggcttggcccacttccctcacactctccctggacctacagggttggtagaagtagctggaacctgcctctcccatgcacagatcagcctggggtcctcaggtacaccacgcatgcattgcagccctgatggcgagtggttggtgcctgtgggtcagtgccagtgcgagcctggctatgaggaaagcggtggaagtgtgggatgcactgcctgtcctactggtttctatcgaatggacatgaatactctccactgtctcaagtgcccccaacatagcgtagcagagtctgaggggtctaccatctgtacctgtgagaatggacattatcgagcccctggggagggcccccaggtagcatgcacgcgtcccccatcagctccccaaaatctgagcttctctgcatcaggcactcagctctccctacgctgggagcccccaagagatacagggggacgccaagatatcagatacagtgtggaatgcttgcagtgtcggggcattgcacaggatgggggtccctgccaaccctgtggaaaaggtgtgcacttttccccggcagcttccgggctcaccgcatctactgtgcaagttgaaggcctcgagccttatgccaactacacgtttaccatcaaatcccagaacagagtgtcgggactggacagttccagccctagcagcgcttctctcagtatcaacatggggcaagcagagtcactctctggcctgtcactgaagctggtgaagaaagagccgaggcagctggagctgacttgggcagggtcccgactccaaaaccctggggggaatctgagctatgagctgcacgtgctgaaccaggatgaagaatggcaccaaatggtgctggaacccagggtcttgctgacaaaacttcagccagataccacatacattgtcagagtacgaacactgaccccactggggcctggccctttctcccctgaccatgagttccggacaagcccaccagtttccagaagcctgactggaggagagattgtggccatcatctttggattgctgcttggaatagctctgctgatcgggatttatgtcttccgttcaaggagaggccagcgacagagacagcagaggcagcgtgaacgcaccaccaatgtcgatcgagaggacaagctgtggctaaaaccctatgtggacctccaggcctatgaggaccctgcacagggagccttagactttgcccaggaactggaccctgcctggctgattgtggacactgtcataggagaaggggagtttggggaagtgtatcggggagccctgagaatccccagccaagactgcaagaccgtggccattaagaccttgaaagacacatccccagatggctactggtggaatttccttcgagaagcaactatcatgggccagttcaaccacccacacattctacgcctagaaggtgtcatcacgaaaagaaagccgatcatgatcatcacagaatttatggaaaatggagcccttgatgcctttctgaaggaacgggaggaccagctagttcctggtcagctagtggctatgcttctgggcatagcatcaggcatgaactacctcagtggccacaattatgtccatagagacctggctgccaggaacatcttggtgaatcagaacttgtgctgcaaggtatctgactttggcctgacccgcctcctggatgacttcgatggcacctatgaaacccagggaggaaagatccctatccgttggacagccccagaagctattgcccatcggatcttcaccacagccagtgatgtttggagctttgggattgtaatgtgggaggtgttgagttttggcgacaaaccctatggggagatgagcaatcaagaggtaatgaaaagcattgaggatgggtaccggctgccccctcctgtggattgtcctgcccccctgtatgaactcatgaagaactgctgggcttacgaccgtgcccgtcggccccacttcctccagctgcaggcacatctggaacagctgctcacggacccccattccctaaggacaattgccaactttgaccctagggtgaccctacgtctgcccagcctgagtggctctgatgggatcccttatcgaagtgtctctgagtggcttgaatccatacgcatgaagcgctacatcctgcacttccgctcggcaggcctggacaccatggagtgtgtgctggagctgacagccgaggacctgacgcagatgggaatcacattgccagggcaccagaagcgcattctctgcagtattcaaggatttaaggactgagcatccactgaaaagatgttccagccctctgtccactccctgggcctttcctcagcctacgaaatgtaggctattggtgctgctcctgcccagtcaatcagaactctgcctttggaccaaggagcctttgtttataaagggggtgggtggggtacaagtgaaggggactgtgggtgggtgggtgctggggggagggtttaatatatatacttacatatgcattatctatttttgtaaataaacagagttgagtttttatccctcccctgatctttttccccatcaagaccctttatttcaactccaagagtatagggtattatcaaaaaaccaagtgctagcaattctggaaaatgaggttttataatcttagctgtggccacaacctagcagcacagagcaaggtgggtgtccaggctgctggagccacgttcccagagggttggggcttccaccctcagcaagcacattgcataggctgctcaggccagccaagggcattggtgcagcagtgaaagcagcagcactaaatgtgacccttgggttgggggcctcaggatgataggtgatccctgcagaagaggcaagggttggagcccagggctgggcctcagcaccaggacggagcctcagtacttctaggccatgctggggccctgggtcagggcacttgagacacaagggagggatttggaatgcagggagggtggaggcaaggactggcctctgtgggtggtccacggtgggggatggacctgtggtgtggaaggaggtccatcttcaactcaggtctgggctctagcagagtggcacttccgacaaaggacatggccatccagagggaaacagccgttgtcatctgcctcaatggacagggctttcccacagtcc

SEQ ID NO: 62 - DNA, 3963 bp, human
attaaggactcggggcaggaggggcagaagttgcgcgcaggccggcgggcgggagcggacaccgaggccggcgtgcaggcgtgcgggtgtgcgggagccgggctcggggggatcggaccgagagcgagaagcgcggcatggagctccaggcagcccgcgcctgcttcgccctgctgtggggctgtgcgctggccgcggccgcggcggcgcagggcaaggaagtggtactgctggactttgctgcagctggaggggagctcggctggctcacacacccgtatggcaaagggtgggacctgatgcagaacatcatgaatgacatgccgatctacatgtactccgtgtgcaacgtgatgtctggcgaccaggacaactggctccgcaccaactgggtgtaccgaggagaggctgagcgtatcttcattgagctcaagtttactgtacgtgactgcaacagcttccctggtggcgccagctcctgcaaggagactttcaacctctactatgccgagtcggacctggactacggcaccaacttccagaagcgcctgttcaccaagattgacaccattgcgcccgatgagatcaccgtcagcagcgacttcgaggcacgccacgtgaagctgaacgtggaggagcgctccgtggggccgctcacccgcaaaggcttctacctggccttccaggatatcggtgcctgtgtggcgctgctctccgtccgtgtctactacaagaagtgccccgagctgctgcagggcctggcccacttccctgagaccatcgccggctctgatgcaccttccctggccactgtggccggcacctgtgtggaccatgccgtggtgccaccggggggtgaagagccccgtatgcactgtgcagtggatggcgagtggctggtgcccattgggcagtgcctgtgccaggcaggctacgagaaggtggaggatgcctgccaggcctgctcgcctggattttttaagtttgaggcatctgagagcccctgcttggagtgccctgagcacacgctgccatcccctgagggtgccacctcctgcgagtgtgaggaaggcttcttccgggcacctcaggacccagcgtcgatgccttgcacacgacccccctccgccccacactacctcacagccgtgggcatgggtgccaaggtggagctgcgctggacgccccctcaggacagcgggggccgcgaggacattgtctacagcgtcacctgcgaacagtgctggcccgagtctggggaatgcgggccgtgtgaggccagtgtgcgctactcggagcctcctcacggactgacccgcaccagtgtgacagtgagcgacctggagccccacatgaactacaccttcaccgtggaggcccgcaatggcgtctcaggcctggtaaccagccgcagcttccgtactgccagtgtcagcatcaaccagacagagccccccaaggtgaggctggagggccgcagcaccacctcgcttagcgtctcctggagcatccccccgccgcagcagagccgagtgtggaagtacgaggtcacttaccgcaagaagggagactccaacagctacaatgtgcgccgcaccgagggtttctccgtgaccctggacgacctggccccagacaccacctacctggtccaggtgcaggcactgacgcaggagggccagggggccggcagcaaggtgcacgaattccagacgctgtccccggagggatctggcaacttggcggtgattggcggcgtggctgtcggtgtggtcctgcttctggtgctggcaggagttggcttctttatccaccgcaggaggaagaaccagcgtgcccgccagtccccggaggacgtttacttctccaagtcagaacaactgaagcccctgaagacatacgtggacccccacacatatgaggaccccaaccaggctgtgttgaagttcactaccgagatccatccatcctgtgtcactcggcagaaggtgatcggagcaggagagtttggggaggtgtacaagggcatgctgaagacatcctcggggaagaaggaggtgccggtggccatcaagacgctgaaagccggctacacagagaagcagcgagtggacttcctcggcgaggccggcatcatgggccagttcagccaccacaacatcatccgcctagagggcgtcatctccaaatacaagcccatgatgatcatcactgagtacatggagaatggggccctggacaagttccttcgggagaaggatggcgagttcagcgtgctgcagctggtgggcatgctgcggggcatcgcagctggcatgaagtacctggccaacatgaactatgtgcaccgtgacctggctgcccgcaacatcctcgtcaacagcaacctggtctgcaaggtgtctgactttggcctgtcccgcgtgctggaggacgaccccgaggccacctacaccaccagtggcggcaagatccccatccgctggaccgccccggaggccatttcctaccggaagttcacctctgccagcgacgtgtggagctttggcattgtcatgtgggaggtgatgacctatggcgagcggccctactgggagttgtccaaccacgaggtgatgaaagccatcaatgatggcttccggctccccacacccatggactgcccctccgccatctaccagctcatgatgcagtgctggcagcaggagcgtgcccgccgccccaagttcgctgacatcgtcagcatcctggacaagctcattcgtgcccctgactccctcaagaccctggctgactttgacccccgcgtgtctatccggctccccagcacgagcggctcggagggggtgcccttccgcacggtgtccgagtggctggagtccatcaagatgcagcagtatacggagcacttcatggcggccggctacactgccatcgagaaggtggtgcagatgaccaacgacgacatcaagaggattggggtgcggctgcccggccaccagaagcgcatcgcctacagcctgctgggactcaaggaccaggtgaacactgtggggatccccatctgagcctcgacagggcctggagccccatcggccaagaatacttgaagaaacagagtggcctccctgctgtgccatgctgggccactggggactttatttatttctagttctttcctccccctgcaacttccgctgaggggtctcggatgacaccctggcctgaactgaggagatgaccagggatgctgggctgggccctctttccctgcgagacgcacacagctgagcacttagcaggcaccgccacgtcccagcatccctggagcaggagccccgccacagccttcggacagacatataggatattcccaagccgaccttccctccgccttctcccacatgaggccatctcaggagatggagggcttggcccagcgccaagtaaacagggtacctcaagccccatttcctcacactaagagggcagactgtgaacttgactgggtgagacccaaagcggtccctgtccctctagtgccttctttagaccctcgggccccatcctcatccctgactggccaaacccttgctttcctgggcctttgcaagatgcttggttgtgttgaggtttttaaatatatattttgtactttgtggagagaatgtgtgtgtgtggcagggggccccgccagggctggggacagagggtgtcaaacattcgtgagctggggactcagggaccggtgctgcaggagtgtcctgcccatgccccagtcggccccatctctcatccttttggataagtttctattctgtcagtgttaaagattttgttttgttggacatttttttcgaatcttaatttattattttttttatatttattgttagaaaatgacttatttctgctctggaataaagttgcagatgattcaaaccgaaaaaaaaaaaaaaaaaa

SEQ ID NO: 63 - DNA, 3907 bp, mouse
attaaggacttggagcaggagggtagaagttgtctctgtcggcgggcgggcaggattggggcaccgagaccggcgtgcggacagcagggatcgcggggagcgaggggtgcggcatggagctccgggcagtcggtttctgcctggcgctgctgtggggttgcgcgctggcggccgcggcggcacagggaaaggaagttgttttgttggacttcgcagcaatgaagggagagctcggctggctcacgcacccctatggcaaagggtgggacctgatgcagaacatcatggacgacatgcctatctacatgtactcggtgtgcaacgtggtatccggcgaccaggacaactggctccgcaccaactgggtgtaccgggaggaggccgagcgcatctttattgagctcaagttcacggtgcgagactgtaacagcttcccgggtggcgccagctcatgcaaagagaccttcaacctctactatgcagagtcagatgtggactatggcaccaacttccagaagcgccagttcaccaagattgacaccatcgcccctgacgagatcacggtcagcagtgacttcgaggctcgcaatgtcaagctgaacgtagaggagcgcatggtggggccccttacccggaagggcttctacctggccttccaggacatcggcgcctgcgtggcgctgctctccgttcgcgtctactacaagaagtgtcccgagatgctgcagagcttggctcgcttccccgagaccattgctgtcgctgtctccgatacacaacccctggccacggtggccggtacctgcgtggaccatgccgtggtgccttatgggggcgaggggcctctcatgcactgcacggtggatggcgagtggctggtgcccatcgggcagtgcctgtgccaggaaggctacgagaaggtcgaggatgcctgccgagcctgttctccaggattcttcaagtctgaggcatctgagagcccttgcctggagtgtccagagcataccctgccatccacagagggtgccacctcctgccagtgtgaagaaggctatttcagggcacctgaggacccactgtccatgtcttgcacacgtccaccctctgcccccaactacctcacggccattggcatgggtgccaaagtagaactgcgttggacagctcccaaggacactggtggccgccaggacattgtctacagtgtcacttgcgaacagtgctggccagagtctggcgagtgtgggccctgtgaggcgagcgtgcgctattcagaacctcctcacgccctgacccgcacgagtgtgacagtcagtgacctggagccccacatgaactataccttcgctgtcgaagcacgcaatggtgtctcaggcctggtgactagccgaagcttccggactgccagcgtcagtattaaccaaacagagccccccaaagtgaggctggaggaccgaagcaccacctccctgagtgtcacctggagcatcccggtgtcacagcagagccgtgtgtggaagtacgaagtcacctaccgcaagaagggggatgccaacagctataatgtgcgccgcacggaaggcttctccgtgaccctggatgaccttgctccggataccacgtacctggtgcaggtgcaggcgctgacgcaggagggccagggagccggcagcaaagtgcacgagttccagacactgtccacggaaggatctgccaacatggcggtgatcggcggtgtggctgtaggtgttgttttgcttctggtactggcaggagttggcctcttcatccatcgaaggaggaggaacctgcgggctcgccagtcctctgaggatgtccgtttttccaagtcagaacaactaaagcccctgaagacctatgtggatcctcacacttacgaagaccccaaccaggctgtactcaagtttaccaccgagatccacccatcctgtgtggcaaggcagaaggtcattggagcaggagagtttggagaggtctataaagggacgctgaaggcatcctcggggaagaaggagataccggtggccatcaagacactgaaagcgggctacactgagaagcagcgggtggacttcctgagcgaggccagcatcatgggccagtttagccaccacaatatcatccgcctggagggcgtggtctctaaatacaaacccatgatgattatcacagagtacatggagaatggagcgctagacaagttccttagggagaaggatggtgagttcagtgtacttcagttggtgggcatgctgaggggtatcgcatccggcatgaagtacctggccaacatgaactacgtgcaccgggacctggccgcccgcaacatcctcgtcaacagcaacctggtgtgcaaggtgtccgattttggcctgtcgcgtgtgctggaagatgaccccgaggccacctacaccacaagtggcggcaagatccctattcgatggacagccccagaggccatttcctaccgcaagttcacctcagccagcgatgtgtggagctacggcattgtcatgtgggaagtgatgacttatggcgaacggccctactgggaactgtcaaaccacgaggtcatgaaagccatcaacgacggcttccggctccctacgcccatggactgcccttcagccatttaccagctcatgatgcagtgctggcagcaagagcgctcccgccgacccaagtttgccgacatcgttagcatcctggacaagctcatccgagcccccgactccctcaagacgctggctgactttgatccccgagtgtccatccggctgcccagcaccagcggctcggagggagtccccttccgtacggtgtccgagtggctggagagcatcaagatgcaacagtacacggaacacttcatggtggctggctacacggccatcgagaaggtggtacagatgtccaacgaagacatcaaaaggatcggagtgcgtcttcctggccaccagaagcgtattgcctacagcctgctgggactcaaggaccaggtcaacacagtggggattcctatctgagtccattggggccgtgcccaacaatacttgaagagccacagtggtctccctgccgacctggtgctggcccactggaactttatttatttctgtttcctcgtctatgcctccctgaggactctgcagggggcttttgaatgacaccctggcctgagcctgggaaacttggatgctggtcagggctctctttcccctgcaaaggacccagctaagcacttagcagtttgccatggccttcccagcatcccctgaggctaaagttccaccaagaccgtcgatatcgacgagggacatttccaaacggacctccccatcttcatttggcctcctgagaagccacctcaggagctgaggctaagcactaagcccaggaccatatgactagggcactgtacgccccgcccctagttagagggtaggttttggacttggctgggtgtggtcacagcaatctcccagtgccttttacagacccagggctctgccctccgccctcgagggccagcttcttgctttcctagggccctctcaggatgcttggctgtgctgaggtttttattaaatatatattttatacttgtggaaagaatgagtgtgtggcagggaccttgccagggctggagacagaggatcccctgcaacagacattcccgggctgggggctggcggacctgcaggagactttccgccagccacccagtctccagcccctttggacaaatgtcgctgtcagtgttacagatttcttttattgggttgtttttttgttgtattttttgaaccttaacttattattttttttatatttattgttagaaaatgacttatttctgctctggaataaagttgcagatggttca

SEQ ID NO: 64 - DNA, 3917 bp, rat
attaaggacttggggcaggagggcagaagttgtctgtggcgagcgggtaggagcgagacatccgggccggcgtgtggacagcagggatcgcggggagcgaggggtgcagcatgaagcttcgggcagccggtttctgcctggccctgttgtggggttgcgcgctggcggccgcggcggcacagggaaaagaagttgttttgctggacttcgcagcaatgaagggggaactcggctggctcacacacccctacggaaaagggtgggacctgatgcaaaacatcatgaatgacatgcctatctacatgtactccgtgtgcaatgtggtgtctggcgaccaggacaactggctccgtaccaactgggtgtaccgggaggaggccgagcgcatctttattgagctcaagttcaccgtgcgagactgcaatagctttccgggtggcgccagctcctgcaaagagaccttcaacctctactatgcagagtcagacgtggactatggcaccaacttccagaagcgccagttcaccaagatcgacaccatcgcccctgacgagatcacggtcagcagtgacttcgaggctcgcaatgtcaagctgaatgtggaggagcgcatggtggggccccttacccggaagggcttctacctggccttccaggacatcggtgcctgtgtggcattgctctctgttcgtgtctactacaagaagtgtcccgagatgcttcagagcttggcccgcttccctgagaccattgctgtcgccgtctcagatgcacagcccctggccacggtggccggtacctgcgtggaccacgctgtggtgccttatgggggcgaggggcctctcatgcactgcacggtggatggtgagtggctggtgcctatcgggcagtgcctgtgccaagaaggctacgagaaggtggaggacgcctgccaagcctgttctccaggattcttcaagtctgaggcatctgagagcccttgcctgcagtgtccggagcataccctgccatccactgagggtgccacctcctgccagtgtgaagaaggctatttcagggcacctgaggacccactgtccatgccctgcacacgtccaccctctgccccccactacctcacggccatcggcatgggtgccaaagtagaactgcgttggacggccccccaggacaccggtgggcgcaaggacatcgtctacagcgtcacttgcgaacagtgctggccagagtccggcgagtgtgggtcctgtgaggccagtgtgcaatactcagaaccacctcaggccctgacccgcacgagtgtgacagtcagcgacctggagcctcacatgaactataccttcactgtcgaagcccgcaatggcgtctcagacctggtgaatagccgaagcttccggactgccagtgtcagcattaaccaaacagagccccccaaggtgagactggaggaccgaagcaccacctccctgagtgtcgcctggagcatcccggtgccacagcagagccgtgtgtggaagtacgaagtcacctaccgcaagaagggggatgccaatagctacaatgtgcaccgtacagacggcttctccgtgaccctggatggccttgctcccggtactacatacctggtgcaggtgcaggcgctgacgcaggagggccagggcgccggcagcaaagtgcacgagttccagacgctgtccacggaaggatctgccaccatggcggtgatcggcggtgtggctgttggcgttgtcctgctcctagtgttagcgggaattggcttcttcatccatcgaaggaggaggaacctgcgggcccgtcagtcctctgaggacgtctacttttccaagtcagaacaactaaagcccctgaagacatatgtggatcctcacacttacgaagaccccaaccaggccgtgctcaagtttaccaccgagatccacccatcctgtgtctccaggcagaaggtcattggagcaggagagtttggagaggtatataaagggacgctgaagtcctcctctgggaagaaggagataccggtggctatcaagacgctgaaagccggctacactgagaagcagcgggtggacttcctaagtgaagccagcatcatgggccagttcagccatcacaatatcatccgcctggagggcgttgtctctaaatacaaacccatgatgattatcacagagtacatggagaatggagcgctagacaagttccttagggagaaggacggcgagttcagcgtactgcagctcgtgggcatgcttcggggcatcgcgtctggcatgaagtacctggccaacatgaactacgtgcaccgggacctggccgcccgcaacatccttgtcaacagtaacctggtatgcaaggtgtccgattttggcctgtcgcgtgtgctggaggatgaccctgaggccacctacaccactagtggcggcaagattcctattcgatggacagccccagaagccatttcctaccgcaagttcacctcagccagtgatgtgtggagctatggaattgtcatgtgggaggtgatgacgtacggagagcggccctattgggagctgtcaaaccatgaggtcatgaaagccatcaacgatggcttccggctccccacgcccatggactgcccctcagccatctaccaactcatgatgcaatgctggcagcaagagcgctcccgccggcccaagtttgctgacattgttagcatcttggacaagctcatccgagcccccgactccctcaagaccctggctgacttcgatccccgagtgtccattcggctacccagcaccagcggctcagagggagtccccttccggacggtgtctgagtggctggaaagcatcaaaatgcaacagtatacggaacacttcatggtagctggctacacggccatcgagaaagtggtgcagatgtccaatgatgacatcaaaaggatcggagtgcgtcttcctggccaccagaagcgcattgcctacagcctgctgggactcaaagaccaagtgaacacagtggggattcctatctgagtctgatggggcctcgtgcccaccttgaccaacaatacttgaagagccacagtggtctccctaccgacctggtgctgggccactggaactttatttatttctgacttcctcgtcgacacctccctgaggactctgcgagggggactcttgaatgacaccctggcatgagccggggaacgcctggtcagggttcctttccccctgcaaaggacccagctaagcacttagcaggttgtcattgcactcccagcatcccctgaggctggagtttggccaagactgtcgatatccacgaggggagtttccaaactgacctccccgtcttttctccccaagaagccacctcaagagctgaggctaagcactaagcccaggaccatatgactagggcactgtaagccccacctctagttagagggtaggttttggacttggctgggtggggccacaacaatctcccagtgccttctacagacccagggctctgccctctgccctcgagggccagtttcttgctttcctagggccctctcaggatgcttggctgtgttgaggttttttttaaatatatattttatacttgtggaaagaatgagtgtgtggcagggaccttgccagggctggggacagaggataccctgcaacagacattcccgggctgaggcctggccgacttgtaggagacttaccacccagccaccccgtctctagcccctttggacaactgtcgctgtcagtgttacagatctgtgttattgggtggtttttgtttttgtttttggaaccttaacttattattatttttttttatatttattgttagaaaatgacttatttctgctccagaataaagttgcagatggttcaaactga

SEQ ID NO: 65 - DNA, 6364 bp, human
ctgggatagaagcggcaggagcagcgttggcaccggcgaaccatggctgggattttctatttcgccctattttcgtgtctcttcgggatttgcgacgctgtcacaggttccagggtataccccgcgaatgaagttaccttattggattccagatctgttcagggagaacttgggtggatagcaagccctctggaaggagggtgggaggaagtgagtatcatggatgaaaaaaatacaccaatccgaacctaccaagtgtgcaatgtgatggaacccagccagaataactggctacgaactgattggatcacccgagaaggggctcagagggtgtatattgagattaaattcaccttgagggactgcaatagtcttccgggcgtcatggggacttgcaaggagacgtttaacctgtactactatgaatcagacaacgacaaagagcgtttcatcagagagaaccagtttgtcaaaattgacaccattgctgctgatgagagcttcacccaagtggacattggtgacagaatcatgaagctgaacaccgagatccgggatgtagggccattaagcaaaaaggggttttacctggcttttcaggatgtgggggcctgcatcgccctggtatcagtccgtgtgttctataaaaagtgtccactcacagtccgcaatctggcccagtttcctgacaccatcacaggggctgatacgtcttccctggtggaagttcgaggctcctgtgtcaacaactcagaagagaaagatgtgccaaaaatgtactgtggggcagatggtgaatggctggtacccattggcaactgcctatgcaacgctgggcatgaggagcggagcggagaatgccaagcttgcaaaattggatattacaaggctctctccacggatgccacctgtgccaagtgcccaccccacagctactctgtctgggaaggagccacctcgtgcacctgtgaccgaggctttttcagagctgacaacgatgctgcctctatgccctgcacccgtccaccatctgctcccctgaacttgatttcaaatgtcaacgagacatctgtgaacttggaatggagtagccctcagaatacaggtggccgccaggacatttcctataatgtggtatgcaagaaatgtggagctggtgaccccagcaagtgccgaccctgtggaagtggggtccactacaccccacagcagaatggcttgaagaccaccaaagtctccatcactgacctcctagctcataccaattacacctttgaaatctgggctgtgaatggagtgtccaaatataaccctaacccagaccaatcagtttctgtcactgtgaccaccaaccaagcagcaccatcatccattgctttggtccaggctaaagaagtcacaagatacagtgtggcactggcttggctggaaccagatcggcccaatggggtaatcctggaatatgaagtcaagtattatgagaaggatcagaatgagcgaagctatcgtatagttcggacagctgccaggaacacagatatcaaaggcctgaaccctctcacttcctatgttttccacgtgcgagccaggacagcagctggctatggagacttcagtgagcccttggaggttacaaccaacacagtgccttcccggatcattggagatggggctaactccacagtccttctggtctctgtctcgggcagtgtggtgctggtggtaattctcattgcagcttttgtcatcagccggagacggagtaaatacagtaaagccaaacaagaagcggatgaagagaaacatttgaatcaaggtgtaagaacatatgtggacccctttacgtacgaagatcccaaccaagcagtgcgagagtttgccaaagaaattgacgcatcctgcattaagattgaaaaagttataggagttggtgaatttggtgaggtatgcagtgggcgtctcaaagtgcctggcaagagagagatctgtgtggctatcaagactctgaaagctggttatacagacaaacagaggagagacttcctgagtgaggccagcatcatgggacagtttgaccatccgaacatcattcacttggaaggcgtggtcactaaatgtaaaccagtaatgatcataacagagtacatggagaatggctccttggatgcattcctcaggaaaaatgatggcagatttacagtcattcagctggtgggcatgcttcgtggcattgggtctgggatgaagtatttatctgatatgagctatgtgcatcgtgatctggccgcacggaacatcctggtgaacagcaacttggtctgcaaagtgtctgattttggcatgtcccgagtgcttgaggatgatccggaagcagcttacaccaccaggggtggcaagattcctatccggtggactgcgccagaagcaattgcctatcgtaaattcacatcagcaagtgatgtatggagctatggaatcgttatgtgggaagtgatgtcgtacggggagaggccctattgggatatgtccaatcaagatgtgattaaagccattgaggaaggctatcggttaccccctccaatggactgccccattgcgctccaccagctgatgctagactgctggcagaaggagaggagcgacaggcctaaatttgggcagattgtcaacatgttggacaaactcatccgcaaccccaacagcttgaagaggacagggacggagagctccagacctaacactgccttgttggatccaagctcccctgaattctctgctgtggtatcagtgggcgattggctccaggccattaaaatggaccggtataaggataacttcacagctgctggttataccacactagaggctgtggtgcacgtgaaccaggaggacctggcaagaattggtatcacagccatcacgcaccagaataagattttgagcagtgtccaggcaatgcgaacccaaatgcagcagatgcacggcagaatggttcccgtctgagccagtactgaataaactcaaaactcttgaaattagtttacctcatccatgcactttaattgaagaactgcactttttttacttcgtcttcgccctctgaaattaaagaaatgaaaaaaaaaaacaatatctgcagcgttgcttggtgcacagattgctgaaactgtggggcttacagaaatgactgccggtcatttgaatgagacctggaacaaatcgtttctcagaagtacttttctgttcatcaccagtctgtaaaatacatgtacctatagaaatagaacactgcctctgagttttgatgctgtatttgctgccagacactgagcttctgagacatccctgattctctctccatttggaattacaaccattgtattttgtttgtggcataaattacagtcatctgtctttcactggaatgaagaccatgcctaggaacattttttaaggactcagctgtggcttttagggcttggttcataccatgggggaaaaaaaagtcctaggagaaagcgacgtggctcattagtgttgcctcttcagtgctcaagccgcctggtggattcctatgacacagggggcctggaaagaaagggaaagtggatttaaaatatatatatacgtaacccaagccccataacccctaactggacaaatgaggtctgtttctttgggcctgaggctgtgccatataaagtcttattttgggactttacaaacttgtcctaactatcttgtggatagtgggctgtgacaatctggaatagagaacgttcacacttcgctcctttaaagaagcgaccccagatctgcaagggagtagattctgctatcttggcctcacagcccttcctgttgattacaaagcccgtggaagaaaacagaacacaccctcctcagttccgtctaaatgtgtttcttctgcttcaattacaccagttctggggcaaagacactgatgaaacaacacccatacctgaaaagaataaatgtgtgactttcaaatcccctttcgcagtgaaagaaacagcaaacacttaagattcagcatctgttctccagttgcactgaggaatgcactgtctcgcagcaccagctctgcagagcccttgccccagactctttgcggttttatttatatgtatttccatatttcattcctgtgtgtcactgctgcattggtgtggcagcaagtgaccaaatgctacaggtcttactatggacaccaggtcaggtgcaaccacacaaaacaaagccagttccatgagctgcctatgatatgcattgcggaagtaacattttacccagggtgtgccattgcagtgatataaatatatttttttcttagactaaatatgagctgactatctcttttgatgtgtgtacataggtgtgagtgtgtgtgtatgcgtgcctgtctgtgtgcgggtgtgtgtatgtgcatagcctcatgcttaggactacccatgaatgttgtggaatgctacacctggagagttctggttttccaccagtttcaagatgaagaactacatgatacagtggacctggagaccatccccttggaaagacaacccagagatgttcagcatcctgtatctacacgcatcctgtatctacacgtgtattttgtagctgtcacactaaccttaataagaattctacagctttggacagaggcattttcaccttaatggtgaagtaatttaaaatataaatccattcaggtgacaacccatcatcaaaattacaaattttctgattgaactcatctgaatcatcagttccttgatggagagagagaaggagatggaatgtgtctggtaaccccaaatggagtacaagtagcctttgttttcctgcataaatggacttgttgaatgcgaacgaatatatgcaattcatatacttttggagatgaacgtagatatgtgtgtcagctttgagatggtgtgtcctggattaatactttgtctcccaatatcacagaaaaatacatgccagtgactcttgaggttaaggtagttgggatgaaatggcctcaggcaatttcacattccctaattacctggaaagttctacagtaattaatatgcagctaactcctgttgccctcacaagagcatcagccttctagaatcggagctccggagtgtgaagattcagtattgatatgatatgtataccaaactccagccaacttactgccatttttcataatctgagtggctgccttgcttatcctaagctgtggttgcagaaaccgtggccatttatataagctataacatcaaatcagggaaaaatgaggaaaaaaaatagattctgaaccatttattgttgaataagtagagaaaatcatcaataaatatttattacattctgacagggtgtgtggcattgtgttctatgccagagtgacaaagttgattcacccctttttggggaccttaatatattttttaagggatgtgcctatgcattgatgcctgaaaaatatgtataaagaaatgaggttgactcttctgagcagttcatcttttccagaggtaagggtaggaggccaacttcagggtctgggtctgagcccgtgggcaagccctggccgagtgagctccaatgctaactcatgtgccgatctctagagcagtgggaaactaccccgctgcaccaaatcaagtagcttcaccttgtgtatgcaggccccaagttattttttagcaatcttacgagtgaaatgttctggtgggttgaaaaacgttcttattttaaagaaaggttgtgctcgctacactgctggtgtgtgcattctgagacctcttgtattcaatctgtgaaggatatgtgtattaatccgtacacccgtatagcctcaatatttgtctgaagacacttaaattctgacccataaaggaaagttctagaagcaatattttcacttatttaacattctccaaacaacatcaagcattgatacacactgaagagtgcgtttattttttgtatcactctaagtatgttggaatatgcaaggactgtggttcaaattagaatgtataaggcatattataatttagttcatactgaataagaaattaacagaacattgttcggttcacacgttccaaactttgagtgatttctggagttagacatagattttctattttgttttaatttgtcaaggtatttttcttcccttcatgaactttaggtacacataacttatgtcatttatttatggtcttttatacctagtttgtaaaattgtaaaatagcaaactaaatgcaaagagtttgcatttgaaaataataaagtagttgccgtatacaaccctgcaaaaaaaaaaaaaaaaaa

SEQ ID NO: 66 - DNA, 6328 bp, mouse
taagcatttattccactgggatagaagcggcaggagcagcgttggcaccggcgaaccatggctgggattttctatttcatcctcttttcgtttctctttggaatttgcgacgctgtcaccggttctagggtataccccgcgaatgaagttactttattggattccagatctgttcagggagagcttgggtggatagcaagccctctggaaggagggtgggaggaagtgagcattatggatgagaaaaatacaccgatccgaacctaccaggtgtgcaacgtgatggaagccagccagaacaactggctgcgaactgactggatcacccgcgaaggggcgcagagggtgtacattgaaattaagttcactctaagggactgcaacagtcttccgggcgtcatggggacttgcaaggagacgtttaacctctactactatgagtcggacaacgacaaggagcgcttcatcagagagagccagtttggcaagatcgacaccatcgcagctgatgagagcttcacgcaggtggacattggtgaccgaatcatgaaactcaacactgagatccgggatgtagggccactgagcaagaaagggttttacctggcttttcaggatgtgggtgcttgcatcgccctggtgtctgtccgtgtgttctacaagaagtgtccactcaccgttcgaaatctagcccagtttcctgataccattactggggctgatacctcttccctggtggaagttcgaggctcctgtgtcaacaactcagaagagaaggatgtgccaaaaatgtactgtggggcagatggtgaatggctggtacccattggcaactgcctatgcaacgctgggcacgaggagcagaatggtgaatgccaagcttgcaaaattggatattacaaagctctttccacggacgcctcctgtgccaagtgtccaccgcacagctactctgtctgggaaggagccacgtcctgcacctgtgaccgaggctttttcagagctgacaacgatgcagcctccatgccctgcacccgcccaccatctgctcccctcaacttgatttctaatgtcaacgagacatcggtgaacttggaatggagcagccctcagaacacaggtggccgtcaggacatttcttacaacgtggtctgcaagaaatgtggagctggtgatcccagcaagtgccggccctgtggaagtggagtccactacacaccacagcagaacggactcaagacgaccagagtctccatcactgacctcctagcacacaccaattacacgtttgagatctgggcagtgaatggagtgtctaagtataaccctagcccggaccagtccgtgtctgtcacagtgacaaccaaccaagcagcaccatcatccattgctttggtccaggctaaagaagttacaagatatagcgtagctctggcttggctggaaccagatcgaccaaatggagtcatcttagaatatgaagtcaaatattatgaaaaggatcagaatgaacgcagctatcgcatagtccggacagctgccaggaacacagatatcaaaggcctgaaccctctgacttcctatgtttttcacgtgcgagccaggaccgctgctggctacggagacttcagcgagcccctggaagtcactactaatacagtgccttcccgcatcattggcgatggagccaactccactgtcctgctggtctccgtctctggcagtgtggtcctcgtggtcattctcattgcagcttttgtgatcagccgaagacggagtaagtacagcaaagcgaaacaagaagcagatgaagagaaacatttgaatcaaggtgttagaacttatgtggatccctttacatacgaagaccccaaccaggcagttcgagaatttgccaaagaaatcgatgcatcctgcattaaaattgaaaaggtcataggagttggtgaatttggagaggtctgcagtgggcgtctcaaagtgcccggcaagagagagatctgtgtggccatcaagactctgaaagctggctatactgacaagcagaggagagacttcctgagtgaggccagcatcatgggacagtttgaccacccaaacataatccacctggaaggcgttgtcaccaaatgtaaaccggtaatgatcataacggagtacatggagaacggctccttggatgctttcctcaggaagaatgatggccgctttacagtcattcagctggtgggcatgctccggggcattggctcggggatgaagtacttatctgatatgagctatgtgcatcgagacctggctgccaggaacatcctggtaaacagcaacttggtctgcaaggtgtctgactttggcatgtccagggtgctggaggatgaccccgaagcagcctacactaccaggggtggcaagattcctatccggtggactgcgccagaagcaattgcgtatcgtaaatttacctcagccagtgatgtctggagctacggaatcgttatgtgggaagtgatgtcatatggagagagaccgtactgggatatgtccaatcaagatgtgatcaaagccatcgaggaagggtaccggctaccccctccaatggactgccccattgccctccatcagttaatgctggactgctggcagaaagagagaagtgacaggcctaaatttgggcagatcgtcaacatgctggacaaactcatccgcaatcccaacagcctgaagaggacagggtcggagagttccagaccaaacacagccttgttagatcccagctcccctgaattctctgctgtagtatcagtgggcgactggctgcaggccatcaaaatggaccggtataaggacaacttcacggccgccgggtacacgacactagaagccgtggttcacatgagccaggacgacctggcgagaattggcatcaccgccatcacgcaccagaataagattttgagcagcgtccaggcgatgcgaacccagatgcagcagatgcatggcaggatggttcctgtctgagccagtaccgaatagactcaaaactctcgaatagtttacctcatccatgcactttaattgaagaactgcactttttttactttgtcttcgccctctgaaattaaaggaaaacaaacaaacaaaaaacaaaaacaaaaatatctgcagcgttgcttggtgtaagagattgctgaaaccatggggcttataatgaatgaccttgatcatcagaattaaacctggagccagtaatttctcagaagaactctgtccatcgctggtgtgtaaaatacatgtacttatataaataaaactctgcctctgagtttcgatgctgtatttcccgtcagaggcttttcaagtcaccctaatcctttctctgtctggaatttcaagggaaggatttcatctgtggcattaataacagtcatcactccttaccagaaagaagacctgctgtgcccaggagcactgttaaaggactcaatggtggctttcagggctcggtttataccacagaagaaaatccaggtgaaagccacttggcccattcatgctgcctcttcaatggccaggacacctggtggatttttatgacatagggggggttagaaagaaaagaaaatggatttttaaaacatgcgaactcccaagacctattaaccctaactggacaaatgaggtctctttggggctgaggctgtgccatataaagtcttctttgagaatgctacaaacttctcataactaccttatggatagtgggctgagacaatcctgaatggagaattttcacacacacacacacacaccccttcaaagaggcaactcccaaatttacaagggaatagattctggtatctcagcctcacagcccttcctgttgattacataagcgcttggaagaaaatagaacacaccctccaccgttccttctgaatgtttttctttggcttctcttctgccggtttttgaggcaaagacacgacaaaacacctgcacctgaacagcagaagaaatgtgtcaagtccccttcgcccaggaaaacgacatccagctttggcatctgttctcagctgcactgaggaatgtgctgtctcgaggcaccagctctgcagagcccttgctcccaaactccttgtggttttatttatacgtatttccatatttcattcctgtacggccccgctgcatccgtgtggcagcaagtgaccatatgttacaggttttactatggacgccaggtcaggcgccaccacgcagaacaaagccagttccgcaagctgcctccgatacgcaatgctaaagtgacattttacccagggtgtgccattgcagtgatataaatatatttttttcctagactaaaatatgacctgaatatctcttttgatgtgtgtacatagagtgtgtgtgtgtgtgtgtgtgtgtgtgtgtatgtgagtgtgtatggggtgtgtgtgtgtgtgtgtgtgtgtgtgtgtaacctcatgcttagaactgcctgtgaatgttgtggaatgctatacctggagagttctggtttattaccagttcaaagataaggaaagagtcacatgatatacaagacccggagaccatgtccgtccccttgggaagacagcttggaaacgctacatgttctttatctgtaagtgtaatgtgtctgtcacattcatcctaagaagcagttctttggacagatgttttcaccttgatggtggaatgatttttagatataagcctgactcgccgatttcacaatggagagagaaggggatggaatccaatttgtgaccccagatggagtataagtcgcctttgtttccctgcataaatgaacttgttgaatgcgaacaaatatatgcaattcatatacttttggaagatgaacttaagatatgtgtgtcagccttgagatgatgtgtctggagtaatactttgtgtcccagtgtcacagaaaaatacatacatgccagtggctcttgaggttaatgtagttgggatgaaatggcctctagcaattccaggttccccaattacatgtggaaagttctggtaattaatatgcagctaactacttatgcccttgaaagtataccagtcttctagaatcggagttctggtgtatgaagattcagtatcgacaggatatgtataccaaactccagccagcatactgccattttacttaacctgagaggctgccttgcttattctgagctatggtcacagaaactgtggccatttatataagctataacatcaaatcagggaattagaaaaaaaaaaaacggggaaaagattctgaaccatatattgttgaataagtaaagaaaatcaccaataaatatttattgcattctgacagggtgtatggcattgtattctcataactatgccagagtgacaaagttatttcaccccttttgaggggaccttaatatatttttaaagggatgtgcctatgcattgatgcctgaaaaataggtgtaaaaaaaaaaaaaaagatgaacctctgagtgcatcatctttcccagaggtcaggtgggaggaggtcaacttctgggtctgtgtccagcccaggagcaagcgctggccttgggagctggaaggctaaaatctagtcaaatctactaaacagctttgagctgttccctgcaccaaatcaagccgtttcaccacgtgtctgcaggctctgaggtttttattttttggcgatcttctaaatgaaatgttctggtgtgttttaaagactagaggaaaggttgtgttcacaacatgattactgtgtgtgttctgagacctcttgtattcatctgtgaaggggacgtgtattaatccatacactcctatagcctcgactatttgtctgaagacacttaaattttgaccagtaaaggaaagttctagaagcaatattttcactcctttagcattgtccaaataacatcaagtattaataaacgctgaagagtgtatttattttgtattactccaagtctgttggaatatgcaaggactgtggttataattagaatgtataaggcatattataatttagttcattctgaaaaagaagttagctgaacatctcttggttcatacatgttccaaattttgaacaatcttttgagttagccatagatttttctattttgtttttatttgtcaaggtatttttttcttcccttcatgaactttaggtacacataacttatgtcatttatttatggtcttttatacctagtttgtaaagttgtaaaatagcaaactaaatgcaaagagtttgcatttgaaagtaataaagtagttgccgtatacaaacctg

SEQ ID NO: 67 - DNA, 6470 bp, rat
taagcatttattccactgggatagaagcggtaggagcagcgttggcaccggcgaaccatggctgggattttctatttcatcctcttttcgtttctctttggaatttgcgacgctgtcaccggttctagggtatacccggcgaatgaagttactttattggattccagatctgttcagggagagcttgggtggatagcaagccctctggaaggagggtgggaggaagtaagcattatggatgagaaaaatacaccgatccgaacctaccaggtatgcaacgtgatggaagccagtcagaacaactggctgcgaactgactggatcacccgagaaggggcgcagagggtgtacattgaaattaagttcactctgagggactgcaacagtcttccgggcgtcatggggacttgcaaggagacgtttaacctttactactatgaatcggacaacgacaaggagcgcttcatcagagagagccagttcggcaagatcgacaccatcgcagcggatgagagctttacacaggtggacattggggacagaatcatgaagctcaacaccgagatccgggatgtagggcccctgagcaagaagggtttttacctggcttttcaggatgtgggtgcttgcatcgccctggtgtctgttcgtgtgttctacaagaagtgtcccctcaccgttcgaaatctagcccagttccccgataccatcactggggctgatacctcttccctggtggaagttcgaggctcctgtgtcaacaactcagaagagaaggatgtgccaaaaatgtactgtggggcagatggtgaatggctggtacccattggcaactgcctatgcaatgctgggcacgaggagcagaatggtgaatgccaagcttgcaaaattggatattacaaagctctctccacggacgccacctgtgccaagtgtccaccgcacagctactctgtctgggaaggagccacgtcctgcacctgtgaccgaggctttttcagagctgacaacgatgccgcgtccatgccctgcacccgcccaccatctgctcccctcaacttgatttctaatgtcaacgagacgtcggtgaacttggaatggagcagtcctcagaacacaggtggccgtcaggacatttcttacaacgtggtctgcaagaaatgtggagctggggatcccagcaagtgtcgaccctgtggaagtggagtccactacacgccacagcagaatggactcaagacgaccagagtctccatcactgacctcctagcacacaccaattacacgtttgagatctgggcagtgaatggcgtgtctaagtacaaccctagcccagaccagtcagtgtctgtcacagtgacaaccaaccaagcagcaccatcatccattgctttggtccaggctaaagaagttacaagatacagtgtggctctggcttggctggaaccagatcgaccaaacggagtcatcttagaatatgaagtgaaatattatgaaaaggatcagaatgaacgaagctatcgcatagttcggacagctgccaggaacacagatatcaaaggcctgaaccctttgacttcttacgtcttccacgtgcgagccaggaccgccgctggctatggagacttcagcgaacccttggaagtcactaccaatacagtgccttcccgaatcattggcgacggggccaactctaccgtcctgctggtctccgtctctggcagtgtagtactcgtggtcattctcattgcggcatttgtgatcagccgtagacggagtaagtacagccaagcaaagcaagaagcagatgaagagaagcatttgaatcaaggtgttagaacatacgtggatccctttacatatgaagaccccaaccaggcagttcgagaatttgccaaagaaatcgatgcctcctgcattaaaatcgaaaaggtcattggagttggcgaatttggagaagtctgcagtgggcgtctcaaagtgcccggcaagagagagatctgtgtggccatcaagactctgaaagctggttatactgacaagcagaggagagacttcctgagcgaggccagcatcatgggacagtttgaccacccaaacataatccacctggaaggcgttgtcaccaaatgtaaaccagtaatgatcatcacggagtacatggagaacggctccttggacgctttcctcaggaagaatgatggccgatttacagtcattcagctggtgggcatgctccgaggcattggctcggggatgaagtacttatctgatatgagctatgtgcatcgagacctggctgccaggaacattctggtaaacagcaacttggtctgcaaggtgtctgatttcggcatgtccagggtgcttgaggatgacccggaagcagcctatactaccaggggcggcaagattcccatccggtggactgcaccagaagcaattgcgtatcgtaaatttacctcagccagtgacgtctggagctacggaatcgttatgtgggaagtgatgtcatatggagagaggccgtactgggatatgtccaatcaagatgtgatcaaagccatcgaggaagggtaccggctacccccgccaatggactgccccattgccctccatcagttaatgctggactgttggcagaaagagagaagcgacaggcctaaatttgggcagatcgtcaacatgttggacaaactcatccgcaaccccaacagcctgaagaggacagggccagagagttccagaccaaacacagccttgttagatcccagctcccctgaattctccgccgtagtatcagtgggtgactggctgcaggccatcaaaatggaccggtataaggacaacttcacagccgccgggtacacgacactagaagctgtggttcacatgagccaggatgacctggcgcgaattggcatcaccgcaatcacgcaccagaataagattttgagcagcgtccaggcgatgcgaacccagatgcagcagatgcatggcaggatggttcctgtctgagccagtaccgaacagactcaaaactctcgaatagtttacctcatccatgcactttaattgaagaactgcactttttttacttcgtcttcgccctctgaaattaaaggaaaacaaacaaacaaacaaacaaacaaaaacacaaatattatctgcagcgttgcttggtgtaagagattgctgaaaccgcggggcttgtaatgaatgaccttgatcatcggaattaaacccggagccagtaatttctcagaagaactctgtccatcgctggtgtgtaaaatacatgtacttatataaataaaactctgcctctgagtttcgatgctgtattccccgtcagatacgtggcttttcaagtcaccggaatcctttctctgtctggaatttcaacggaaggatttcatctgtggcattaactacagtcatcactccttactgggacgaagaccctctgtgccccaggagcattgttaaaggactcaatggtggctgtcagggcttggtttataccacagaggaaaatgcaggtgaaaaccacttggcccattcatgctgcctcgtcagtgcccaggacacctggcggattgttaggacaaagaggggtgggggtggggctagaaagacaagaaaatggatttttaaaaaaatgcaaactcccaagccctattacccctaaccggacaaatgaggtttctttgggctcgaggctgtgccatataaagtcttgtttgggaatgctacaaacttatcataactaccttatggatagtgggctgagacaatcctgaatggagaattttcacacacccctttaaagaggcaactcccaaatttacaagggaatagattctggtatctcagcctctcagcccttcctgttgatgacataagcccttggaagaaaagagaacacaccctccttggttccttctgaatgtttttctttggcttctcttctgccagttctgaggcaaagacacgacaaaacacctgtacctgaaaagcaaaagaaatgtgtcaagtccccttcgcccaggaaaacatcaagctttggcagctgttctccagttgcacggaggaacgtgcgtctcaagacaccagctctgcagagcccttgctcccaaactccttgtggttttatttatacgtatttccatatttcattcctgtacgtcactgctgcatccatgtggcagcacgtgaccaaatggtacaggttttactatggacgccaggtcaggcgccaccacgcagaacaaagccagttccgtaagctgcctccgataagcattgctgaagtgacattttacccagggtgtgccattgcagtgatacaaatatatttttttcctagactaaaatatgacctgaatatctcttttgatgtgtgtaaataggtgtgagtgagtgagtatgtgtgtgtgtgtttgtgtgtgtgtgtgtgtgtgtgtgtgcttgcatacgtgtgtgcgtgcgtgacctcatgcttagaactgcctgtgaatgttgtggaatgctatacctggagagttctggtttattaccagttcaaagatagagagtcacatgatatacgagacccggagaccatgtccgtccccttgggaagacagcttggaaatactacgtgttctttatccgtaagtgtaatgtgtctgtcacattcatcctaagaagcagttctttggacagttttcaccccgatggtggaatgagtttcttgatatacacctgactggccagttccacaatggagagagaaggggatggaatccgtatagtgaccccggatggagtataagtcgcctttgtttccctgcataaatgaccttgctgaatgcgaacaaatatatgcaattcatatactttttggagatgaacttagatatgcgtgtcagccttgagatgacgtgtctggagtaatactttgtgtcccagtgtcacagaaaaatacatccatgccagtggctcttgaggttaataatgtagttgggatggaatggcctctagcaaatccaggttccccaattacatgtagaaagttctggtaattaatatgcagctaactacttctgcccttgaaagtacatcggtcttctagaatcagagttctggtgtatgaagattcagtattgacaggatatgttataccaaactccagccagcatactgccatgttacttaacctgagtggctgccttgcttattccgagcgatggttacagaagctgtgaccatttatataagctataacatcaaatcagggaattaaaaaaaaaaaaaaaacgggggaaaaattctgaaccatatattgttgaataagtaaagaaaatcaccaataaatatttattgcattctgacagggtgtgtgtggcattgtattctcgtaactatgccagagtgacaaagctaattcaccccttttggggggaccttaatatatttttaaagggatgtgcctatgcattgatgcctgaaaaatatgtgtaaaaaaaaagatgaagttgtacctttgagtggatcatctttcccaaaggtcaggtgggaggaggtcaacttccgggtctgtgttcagctcaggatcgagcgctggtctcgtgagctggaaggctaaaatctgttcaaatctactaagcagcttcgagctgttccctgcaccaaatcaagttgtttcaccacgtgtctgcaggctctgagttatttttggcaatctgataaatgaaatgttctggtgtgtttaaaagaatagaggaaaggttgtgttcgcaacctcatttctgtgtgttctgagacctcttgtattcatctgtgaagggtacgtgtatcaatccatacactcctatagcctcaatgacttgtctgaagacacttaaattttgaccagtaaaggaaagttctagaagcaatattttcactcctttagcattgtccaaataacatcaagtattaataaacgctgaagagtgtatttattttgtattactccaagtctgttggaatatgcaaggactgtggttataattagaatgtataaggcataattataatttagttcattctgaaaaagaagttagccggacatctcttgtttcatacatgttccaaattttgagcaatcttttgagttagccatagatttttttctattttgttcttatttgtcaaggtatttttttcttcccttcatgaactttaggtacacataacttatgtcatttatttatggtcttttatacctagtttgtaaagttgtaaaatagcaaactaaatgcaaagagtttgcatttgaaagtaataaagtagttgctgtattcaaacctgaaatctggttgtctatgttctatttcattttcttcagtgttggggacacacatgctgggcaaatgcttcaccaaagagctaagcccaggctccttttacatcaagacaagctcttactaagttgctgagcatgg

SEQ ID NO: 68 - DNA, 3349 bp, human
ggtggactgagccgctcgggacagcggcaccggaggaggctcggagaagatgcggggctcggggccccggggtgcgggacaccggcggcccccaagcggcggcggcgacacccccatcaccccagcgtccctggccggctgctactctgcacctcgacgggctcccctctggacgtgccttctcctgtgcgccgcactccggaccctcctggccagccccagcaacgaagtgaatttattggattcacgcactgtcatgggggacctgggatggattgcttttccaaaaaatgggtgggaagagattggtgaagtggatgaaaattatgcccctatccacacataccaagtatgcaaagtgatggaacagaatcagaataactggcttttgaccagttggatctccaatgaaggtgcttccagaatcttcatagaactcaaatttaccctgcgggactgcaacagccttcctggaggactggggacctgtaaggaaacctttaatatgtattactttgagtcagatgatcagaatgggagaaacatcaaggaaaaccaatacatcaaaattgataccattgctgccgatgaaagctttacagaacttgatcttggtgaccgtgttatgaaactgaatacagaggtcagagatgtaggacctctaagcaaaaagggattttatcttgcttttcaagatgttggtgcttgcattgctctggtttctgtgcgtgtatactataaaaaatgcccttctgtggtacgacacttggctgtcttccctgacaccatcactggagctgattcttcccaattgctcgaagtgtcaggctcctgtgtcaaccattctgtgaccgatgaacctcccaaaatgcactgcagcgccgaaggggagtggctggtgcccatcgggaaatgcatgtgcaaggcaggatatgaagagaaaaatggcacctgtcaagtgtgcagacctgggttcttcaaagcctcacctcacatccagagctgcggcaaatgtccacctcacagttatacccatgaggaagcttcaacctcttgtgtctgtgaaaaggattatttcaggagagagtctgatccacccacaatggcatgcacaagacccccctctgctcctcggaatgccatctcaaatgttaatgaaactagtgtctttctggaatggattccgcctgctgacactggtggaaggaaagacgtgtcatattatattgcatgcaagaagtgcaactcccatgcaggtgtgtgtgaggagtgtggcggtcatgtcaggtaccttccccggcaaagcggcctgaaaaacacctctgtcatgatggtggatctactcgctcacacaaactatacctttgagattgaggcagtgaatggagtgtccgacttgagcccaggagcccggcagtatgtgtctgtaaatgtaaccacaaatcaagcagctccatctccagtcaccaatgtgaaaaaagggaaaattgcaaaaaacagcatctctttgtcttggcaagaaccagatcgtcccaatggaatcatcctagagtatgaaatcaagtattttgaaaaggaccaagagaccagctacacgattatcaaatctaaagagacaactattactgcagagggcttgaaaccagcttcagtttatgtcttccaaattcgagcacgtacagcagcaggctatggtgtcttcagtcgaagatttgagtttgaaaccaccccagtgtttgcagcatccagcgatcaaagccagattcctgtaattgctgtgtctgtgacagtgggagtcattttgttggcagtggttatcggcgtcctcctcagtggaagttgctgcgaatgtggctgtgggagggcttcttccctgtgcgctgttgcccatccaagcctaatatggcggtgtggctacagcaaagcaaaacaagatccagaagaggaaaagatgcattttcataatgggcacattaaactgccaggagtaagaacttacattgatccacatacctatgaggatcccaatcaagctgtccacgaatttgctaaggagatagaagcatcatgtatcaccattgagagagttattggagcaggtgaatttggtgaagtttgtagtggacgtttgaaactaccaggaaaaagagaattacctgtggctatcaaaacccttaaagtaggctatactgaaaagcaacgcagagatttcctaggtgaagcaagtatcatgggacagtttgatcatcctaacatcatccatttagaaggtgtggtgaccaaaagtaaaccagtgatgatcgtgacagagtatatggagaatggctctttagatacatttttgaagaaaaacgatgggcagttcactgtgattcagcttgttggcatgctgagaggtatctctgcaggaatgaagtacctttctgacatgggctatgtgcatagagatcttgctgccagaaacatcttaatcaacagtaaccttgtgtgcaaagtgtctgactttggactttcccgggtactggaagatgatcccgaggcagcctacaccacaaggggaggaaaaattccaatcagatggactgccccagaagcaatagctttccgaaagtttacttctgccagtgatgtctggagttatggaatagtaatgtgggaagttgtgtcttatggagagagaccctactgggagatgaccaatcaagatgtgattaaagcggtagaggaaggctatcgtctgccaagccccatggattgtcctgctgctctctatcagttaatgctggattgctggcagaaagagcgaaatagcaggcccaagtttgatgaaatagtcaacatgttggacaagctgatacgtaacccaagtagtctgaagacgctggttaatgcatcctgcagagtatctaatttattggcagaacatagcccactaggatctggggcctacagatcagtaggtgaatggctagaggcaatcaagatgggccggtatacagagattttcatggaaaatggatacagttcaatggacgctgtggctcaggtgaccttggaggatttgagacggcttggagtgactcttgtcggtcaccagaagaagatcatgaacagccttcaagaaatgaaggtgcagctggtaaacggaatggtgccattgtaacttcatgtaaatgtcgcttcttcaagtgaatgattctgcactttgtaaacagcactgagatttattttaacaaaaaaagggggaaaagggaaaacagtgatttctaaaccttagaaaacatttgcctcagccacagaatttgtaatcatggttttactgaagtatccagttcttagtccttagtct

SEQ ID NO: 69 - DNA, 4759 bp, mouse
agacacagcaggagcgagcgagcgagcgagcgagcgagcgccgcgcgggtgcagtcgccggttcgccctggtcgccgcgcactccgcctccgcgctgagcagcgggaaccgcagcggctcgagcctccgggctctgctgcgctctcgggcccgcgctccagcccgctccgccggtcgcaccgcccccggccgagctcagcccgcagcgatttgacttccctctgccagcctctccagttctctagatcgcttgctgcctgggctccactctactcggtgtttgccacacaccgtttgctctactcttctccccttgatccgtagacactctgcttgattcccccctcctccctcctctctgtctctctctctctctctgtctctctctctgtctctctctctcttttattgaaaacatcatcttgatttaagatgactcgtcttctttaatctcgtccatatcggcactgaagactgaaagggaaccttcaccaccactccgaccctggtggcacttaaaaaaaaaaaagaagaagaagaagaaggggggtgccagaaaaagaaaaagtcttaaagggcaaagaagcgggactcccgaccctctacagacccttgaccgagcccacccaggactgtactagccatcagaacttctaattcatcttatccaactgaaagggagggcgacaggagccagaagcaaacttcttcagcggtctctgcggatctgtgattcccgcatttagaggggtcgagagccagaaggtacaggaccccaccaggaggaggagttccacgtctctctcgccccttccaccaagcctgaaccttaggctgagccacgcaggacacaagaggcagaagagggtagtagaaaatgcggggctccgggccccgcggtgcgggacaccgacggacccagggcagaggtggcggcgacgacaccccccgcgtccctgcctctctggcaggctgctattcggcacctctaaagggccccctctggacgtgccttctcttgtgtgcggcgctccggacccttttggccagccccagcaacgaagtgaatttgttggattcgcgcactgtcatgggggaccttggatggattgcttttccaaagaacgggtgggaagagattggtgaagttgatgagaactatgcccccatccacacataccaagtgtgcaaagttatggaacagaatcagaataattggctgttgaccagttggatctctaacgaaggtgcttccagaatctttattgaactcaagtttactttaagggactgcaacagccttcctggaggactggggacttgtaaggagacatttaacatgtattattttgaatcagatgatgagaatgggagaagtatcaaagagaaccaatacatcaagattgataccatcgctgcagatgagagcttcacagaacttgatcttggtgaccgtgtcatgaaactgaatacagaggtcagagatgtcggacctctgagcaaaaagggattttatcttgctttccaagatgtcggtgcttgcattgctctggtttctgtccgtgtctactataaaaagtgtccctctgtagtaagacacttggctatcttccctgacactatcactggagcagattcatcacagttgttagaggtgtcaggctcctgcgtcaaccattctgtgacagatgatcctcccaagatgcattgcagtgctgaaggggagtggctggttcccattgggaaatgcatgtgcaaggctggatatgaagagaaaaatggtacctgccaagctccttctccagtcaccaatgtgaaaaaggggaagattgcaaagaacagcatttctttgtcttggcaagagccagatcgccccaatggaattatcctggagtatgaaatcaagtactttgaaaaggaccaagagaccagttacacaattatcaagtctaaagagaccagtattacagccgagggcctgaaacctgcatctgtgtatgtcttccaaattcgagcacgtacagcagcaggctacggcgtcttcagtcgaagatttgagtttgaaaccacaccagtgtcagttgcagcatctaatgatcaaagccagattcccatcattgcagtgtcagtgacagtgggagtcatcttgttggcagtgatgatcggcttcctcctcagtggcagttgctgcgattgtggctgtgggagggcttcttccctgtgcgctgttgcccatccaagcctaatatggcggtgtggctacagcaaagcaaagcaggatccagaagaggaaaagatgcactttcataacgggcacattaaactgccaggagtcagaacctatattgatccgcacacttatgaagatcccaatcaagctgttcatgaatttgcgaaggagattgaagcttcatgcatcaccattgagagagtgatcggagcaggtgaatttggtgaagtttgcagtggacgtttgaaactacctggaaaaagagaattacctgtggctatcaaaactcttaaagtaggctatactgaaaagcagcgcagagatttcctgggtgaagcaagtattatggggcagttcgatcatccaaacatcatccatctagaaggtgttgtgactaaaagcaaacctgtgatgatagtgacagagtacatggagaacggctccttagacacgtttttaaagaaaaacgatgggcagttcactgtgattcagcttgttggcatgctgagaggcatcgctgcaggaatgaagtacctttctgacatgggctacgtgcatagagaccttgctgctagaaacatcttaatcaacagtaaccttgtgtgcaaggtgtctgactttggactttccagggtactggaagatgatcctgaggcagcctacaccacaaggggaggcaaaattccaatcagatggactgccccggaggcaatagcttttcgaaagttcacctcttccagtgatgtctggagctatggcattgtaatgtgggaagttgtatcttatggagagagaccctactgggagatgaccaatcaggatgtgatcaaggcagtagaagaaggctaccgcctgccaagccccatggattgccctgctgctctctatcaattaatgctggattgctggcagaaagatcgaaacagcaggcccaagtttgatgaaatcgtcaacatgctggacaaactgatacgaaacccaagtagtctgaagacactggtgaatgcgtcgagcagagtgtctacattgttggcagaacatggttctttggggtctggggcctacagatcagtaggtgaatggctggaagcaatcaaaatgggtcggtacacagagattttcatggaaaatggatacagttcaatggacgctgtggctcaggtgaccttggaggatttgaggcgcctgggagtgactctggtcggtcaccagaagaagatcatgagcagccttcaagagatgaaggtgcagatggtaaacgggatggtgccagtgtgacccgcgcatgggtcacttctccaagtgaacaactcagcactttgtaaacaaccctgagatttattttaacagagaaaggggaaagggtggtttctaaacctttggaggcatttgccttaacctttgagtttataatcaatattttactaaaatctccagatcttcctcttaatccacaatgtacaggtaacctgcaaagagagctaacatgacgatcaacatcctttattaaaatagtaacgaaatcttccccacttcttccatggagtcttgtacaggaaatgtatcaagctagagcacctttagagactgttaaggcagcccctttcaaaacttccagggatcaacttgaaaggaaaagttttaaagccatgtgtgggctaagaaaagctgcattttactgacgtttacttcaagtcttaattgtctacatgagtgtattgaagagcaatatgattagattatttcttaaatagactttgtaatttaaaatgaaattacatgttgttaagttatagaagatagtttataaacatgttgcttggtcaaggaaaagttcaatacagggtgtatatttatttttctgtgttagaaaatttacttttagttgctcttctagagagtattaggtaatgaatgtgtatatatgtatagtttgcaatatatgcaggaactgacttacatcgaaattgtgtgtgtgtgtgtgtgtgcgtgcgtgcgcgtgtgtatgtgtatgtatttgaatatgtggagggtatttttttgcttgccttttggatagtgttttaattttgacgacatacaggaaagtgtcttctagactctatcatgggtaaaagagtagaaagccgtagaccaaattcccatccaagttggtatcttatgctctcatttttaaagcaactaattagtttatttaaacagctaatgcctctagactaaattccctttggattttacaaacactccctacctgcctgtgacagagaagttcttaccattaatctttcatgcttctttgaaattccacctaagttcctgaaaatatcttctaaagcaaatttgacacaaagggcacacttgtgaagaagaagagagatgtgactgcgctggcttctgttaccatccaattcaggcagagggtactctatatctcccttcatgtttatccatttgtgaccacttccactgtgactcattcacagagagttttatactaagacagcattaaaaagtgaagaaaaattatga

SEQ ID NO: 70 - DNA, 3201 bp, rat
atgcggggctccgggccccgcggtgcgggacgccgacggacccagggcagaggtggcggcggcgacaccccccgcgtccctgcctctctggcaggctgctattccgcacctctaaaggggcccctctggacgtgccttctcctgtgtgcggcgctccggacccttttggccagccccagtaacgaagtgaatttattggattcgcgcactgtcctgggagaccttggatggattgcttttccaaagaatgggtgggaagagattggtgaagttgatgaaaactatgcccccatccacacctatcaagtgtgcaaagttatggaacagaatcagaataattggctgttgaccagttggatctctaacgaaggtgcttccagaatttttattgaactcaagtttactctgagggattgcaacagccttcctggaggactggggacttgcaaggagacctttaacatgtattattttgagtcggatgatgagaatgggagaaatatcaaagagaaccagtacatcaagatcgataccattgctgctgatgagagcttcaccgaacttgaccttggagaccgggtcatgaagctgaatacggaggtcagagatgtaggacctctgagcaaaaagggattttatcttgctttccaagatgtcggtgcttgcatcgctctggtttctgtccgtgtctactataaaaaatgtccttctgtagttagacatttggctgttttccctgacacgatcactggagcagattcttcccagttgctagaggtgtcaggctcctgcgtcaaccattctgtgacagacgatcctcccaaaatgcattgcagtgctgaaggggagtggctggttcccatcgggaaatgcatgtgcaaggccggatatgaagagaaaaatggtacctgtcaagtgtgcagacctgggttcttcaaagcctctcctcacagccagacctgcagcaaatgtccacctcacagttacacccatgaggaagcttccacctcttgtgtctgtgaaaaggattatttcaggagggaatctgatccgcccacaatggcatgcacaagacccccctcagctcctcggaatgccatctcaaatgttaatgaaactagtgtctttctggagtggattcctcctgctgacactggtggacggaaagatgtgtcctattacattgcatgcaagaagtgcaactcccatgcaggtgtgtgtgaggagtgtggcggtcatgtcaggtacctcccccagcaaatcggcctgaaaaatacctctgtcatgatggcggacctccttgctcacacaaactatacctttgaaattgaggcagtgaacggagtttccgacttgagtccaggcacccggcagtatgtgtctgtaaatgtaaccacgaaccaagcagctccttctccagtcaccaacgtgaagaaggggaagatcgcaaagaacagcatttctttgtcttggcaagagccagatcgccccaatgggatcatcctggagtacgaaatcaagtactttgaaaaggaccaagagaccagctacacaattatcaagtctaaagagaccactattacggcagagggcctgaaacctgcgtctgtgtatgtcttccaaattcgagcacgtacagcagcaggctacggcgtcttcagtcgacggtttgagtttgaaaccacaccagtgtttgcagcatctaatgatcaaagccagattcccatcattgcggtgtcagtgacggtgggagtcatcttgttggcagtgatgatcggcttcctcctcagtggcagttgctgcgatatgtggctgtgggagggcttcttccctgtgcgctgttgcccatccaagcctaatatggcggtgtggctacagcaaagcaaagcaggatccagaagaggaaaagatgcactttcataacgggcacattaaactgccaggagtaagaacgtacattgatccacacacctacgaagatcccactcaagccgttcatgaatttgccaaggagatcgaggcctcatgcatcaccattgagagagttattggagcaggtgaatttggtgaagtttgtagtggacgtttgaaactacccggaaaaagagaattgcctgtggctatcaaaactcttaaagtaggctacactgaaaagcagcgcagagattttctgagtgaagcgagtatcatggggcagtttgatcatccaaacatcatccatctagaaggcgttgtgactaaaagtaaacctgtgatgatagtgacagagtacatggagaatggctccttagacacatttttaaagaaaaacgatggccagttcactgtgattcagcttgttggcatgctgagaggcatcgctgcaggaatgaagtacctttctgacatgggctacgtgcacagagaccttgctgctagaaacatcttaatcaacagtaaccttgtgtgcaaagtgtctgactttggactttccagggtgctggaagatgatcctgaggcagcctataccacaaggggaggcaaaattccaatcaggtggactgctccagaagcaatagcttttcgaaagtttacctctgccagtgatgtctggagctatggaatcgtaatgtgggaagttgtgtcctatggagagagaccgtactgggagatgaccaatcaggatgtgatcaaggcagtggaagaaggctaccgcctgccaagccccatggattgtcctgctgccctctatcaattaatgctggattgctggcagaaagatcgcaacagcaggcccaagtttgatgacatagtcaacatgctggataagctgatacgaaacccaagtagtttgaagacactggtgaacgcgtcaagcagggtatctactttgttggcagaacatggatctttggggtctggggcctacagatcagtaggtgaatggctagaagcaatcaaaatgggccggtacacagagattttcatggaaaatggatacagttcaatggacgctgtggctcaggtgaccttggaggatttgagacgcctgggagtgactctggtcggtcaccagaagaagatcatgaacagccttcaagagatgaaggtgcagctggtaaacgggatggtgccagtgtgacccgcacacgggtcacttctccaagtgaacaactctgcactttgtaaacagccctaagatttattttaacagagaaaggg

SEQ ID NO: 71 - DNA, 5229 bp, human
gcagtcggagacttgcaggcagcaaacacggtgcgagcgaacaggagtgggggggaaattaaaaaaagctaaacgtggagcagccgatcggggaccgagaaggggaatcgatgcaaggagcacaataaaacaaaagctacttcggaacaaacagcatttaaaaatccacgactcaagataactgaaacctaaaataaaacctgctcatgcaccatggtttttcaaactcggtacccttcatggattattttatgctacatctggctgctccgctttgcacacacaggggaggcgcaggctgcgaaggaagtactactgctggattctaaagcacaacaaacagagttggagtggatttcctctccacccaatgggtgggaagaaattagtggtttggatgagaactataccccgatacgaacataccaggtgtgccaagtcatggagcccaaccaaaacaactggctgcggactaactggatttccaaaggcaatgcacaaaggatttttgtagaattgaaattcaccctgagggattgtaacagtcttcctggagtactgggaacttgcaaggaaacatttaatttgtactattatgaaacagactatgacactggcaggaatataagagaaaacctctatgtaaaaatagacaccattgctgcagatgaaagttttacccaaggtgaccttggtgaaagaaagatgaagcttaacactgaggtgagagagattggacctttgtccaaaaagggattctatcttgcctttcaggatgtaggggcttgcatagctttggtttctgtcaaagtgtactacaagaagtgctggtccattattgagaacttagctatctttccagatacagtgactggttcagaattttcctctttagtcgaggttcgagggacatgtgtcagcagtgcagaggaagaagcggaaaacgcccccaggatgcactgcagtgcagaaggagaatggttagtgcccattggaaaatgtatctgcaaagcaggctaccagcaaaaaggagacacttgtgaaccctgtggccgtgggttctacaagtcttcctctcaagatcttcagtgctctcgttgtccaactcacagtttttctgataaagaaggctcctccagatgtgaatgtgaagatgggtattacagggctccatctgacccaccatacgttgcatgcacaaggcctccatctgcaccacagaacctcattttcaacatcaaccaaaccacagtaagtttggaatggagtcctcctgcagacaatgggggaagaaacgatgtgacctacagaatattgtgtaagcggtgcagttgggagcagggcgaatgtgttccctgtgggagtaacattggatacatgccccagcagactggattagaggataactatgtcactgtcatggacctgctagcccacgctaattatacttttgaagttgaagctgtaaatggagtttctgacttaagccgatcccagaggctctttgctgctgtcagtatcaccactggtcaagcagctccctcgcaagtgagcggagtaatgaaggagagagtactgcagcggagtgtcgagctttcctggcaggaaccagagcatcccaatggagtcatcacagaatatgaaatcaagtattacgagaaagatcaaagggaacggacctactcaacagtaaaaaccaagtctacttcagcctccattaataatctgaaaccaggaacagtgtatgttttccagattcgggcttttactgctgctggttatggaaattacagtcccagacttgatgttgctacactagaggaagctacaggtaaaatgtttgaagctacagctgtctccagtgaacagaatcctgttattatcattgctgtggttgctgtagctgggaccatcattttggtgttcatggtctttggcttcatcattgggagaaggcactgtggttatagcaaagctgaccaagaaggcgatgaagagctttactttcattttaaatttccaggcaccaaaacctacattgaccctgaaacctatgaggacccaaatagagctgtccatcaattcgccaaggagctagatgcctcctgtattaaaattgagcgtgtgattggtgcaggagaattcggtgaagtctgcagtggccgtttgaaacttccagggaaaagagatgttgcagtagccataaaaaccctgaaagttggttacacagaaaaacaaaggagagactttttgtgtgaagcaagcatcatggggcagtttgaccacccaaatgttgtccatttggaaggggttgttacaagagggaaaccagtcatgatagtaatagagttcatggaaaatggagccctagatgcatttctcaggaaacatgatgggcaatttacagtcattcagttagtaggaatgctgagaggaattgctgctggaatgagatatttggctgatatgggatatgttcacagggaccttgcagctcgcaatattcttgtcaacagcaatctcgtttgtaaagtgtcagattttggcctgtcccgagttatagaggatgatccagaagctgtctatacaactactggtggaaaaattccagtaaggtggacagcacccgaagccatccagtaccggaaattcacatcagccagtgatgtatggagctatggaatagtcatgtgggaagttatgtcttatggagaaagaccttattgggacatgtcaaatcaagatgttataaaagcaatagaagaaggttatcgtttaccagcacccatggactgcccagctggccttcaccagctaatgttggattgttggcaaaaggagcgtgctgaaaggccaaaatttgaacagatagttggaattctagacaaaatgattcgaaacccaaatagtctgaaaactcccctgggaacttgtagtaggccaataagccctcttctggatcaaaacactcctgatttcactaccttttgttcagttggagaatggctacaagctattaagatggaaagatataaagataatttcacggcagctggctacaattcccttgaatcagtagccaggatgactattgaggatgtgatgagtttagggatcacactggttggtcatcaaaagaaaatcatgagcagcattcagactatgagagcacaaatgctacatttacatggaactggcattcaagtgtgatatgcatttctcccttttaagggagattacagactgcaagagaacagtactggccttcagtatatgcatagaatgctgctagaagacaagtgatgtcctgggtccttccaacagtgaagagaagatttaagaagcacctatagacttgaactcctaagtgccaccagaatatataaaaagggaatttaggatccaccatcggtggccaggaaaatagcagtgacaataaacaaagtactacctgaaaaacatccaaacaccttgagctctctaacctcctttttgtcttatagactttttaaaatgtacataaagaatttaagaaagaatatatttgtcaaataaaatcatgatcttattgttaaaattaatgaaatattttccttaaatatgtgatttcagactattcctttttaaaatcatttgtgtttattcttcataaggactttgttttagaaagctgtttatagctttggacctttttagtgttaaatctgtaacattactacactgggtacctttgaaagaatctcaaatttcaaaagaaatagcatgattgaagatacatctctgttagaacattggtatcctttttgtgccattttattctgtttaatcagtgctgttttgatattgtttgctaattggcaggtagtcaagaaaatgcaagttgccaagagctctgatattttttaaaaagaatttttttgtaaagatcagacaacacactatcttttcaatgaaaaaagcaataatgatccatacatactataaggcacttttaacagattgtttatagagtgattttactagaaagaatttaataaactcgaagtttaggtttatgagtatataaacaaatgaggcacttcatctgaagaatgttggtgaaggcaagtctctgaaagcagaactatccagtgttatctaaaaattaatctgagcacatcaagattttttcattctcgtgacattaggaaatttaggataaatagttgacatatattttatatcctcttctgttgaatgcagtccaaacatgaaaggaaataattgttttatattataactctgaagcatgataaaggggcagttcacaattttcaccatttaaacacaaatttgctgcacagaatatcaccattgcagttcaaaacaaaacaaaacaaaaagtcttttgtttgtgaacactgatgcaagaaacttgttaaatgaaaggactctttaccctagaaggaagaggtgaaggatctggcttgtttttaaagctttatttattaaaccatattatttgattactgtgttagaatttcataagcaataattaaatgtgtctttatagatattgcaggaatgtatacatattgtgattaatgctttcaaaacttatgaaaatcatgaactaccccagaattgaactgttgtacttccaaagagaattgggctgtttataatgattttaatagagaaagatcccagggatcggtcataattggtcttgtttgataatgtgggcatccacaaacaaacaaacaaataacagaaacaaaatctgtaaatgttcctttgtaaaacttgtaaattttatttatactgtcttgttttgtacacacatttctctgtagtgggctctgaatacattgaaaatgcactatatttttctattttacttgcagagcatcacaaaagaacaggtattttcagtgctacataatgtgttttcccacatttaggaccaaagacggctatagaaaaactcaaatggattgcttcccaaacccctccccaccctttttttttggttttaaatcactgtacagtgttatttgatattttaatttattttttgattgactagaaaaatcattttaatttcactaaaatgttttttgtccctaaggaaaagtaatctgtaaaaataattttaattagcataatacagtcacctagacacttccatttgtaatctttgtaatagactgtaaatatatttttggaactataaaaaaaaaaaaaaaa

SEQ ID NO: 72 - DNA, 4304 bp, mouse
aagcggccggtctgcagtcggagacttgcaggcagcaaacacggtgcgaacgaaccggaggggggagagagaaatcaaacagctaagcgtggagcagacggcctgggacccagaaggggatcgatgcgaggagcgcaataataacaacaataataacccacttcggagcaaacagcatctaaagagctgcgacccaactgcagcctaaaaaaatcaaacctgctcatgcaccatggttgttcaaactcggttcccttcgtggattattttgtgttacatctggctgcttggctttgcacacacgggggaggcgcaggctgcgaaggaagtactattactggactcgaaagcacaacaaacagaattggaatggatttcctctccacccagtgggtgggaagaaattagtggtttggatgagaactacactccgataagaacataccaggtgtgccaggtcatggagcccaaccagaacaactggctgcggactaactggatttctaaaggcaacgcacaaaggatttttgtagaattgaaattcaccttgagggattgtaatagtcttcccggagtcctgggaacttgcaaggaaacgtttaatttgtactattatgaaacagactacgacaccggcaggaatatacgagaaaacctttatgttaaaatagacaccattgctgcagatgaaagtttcacacaaggtgaccttggtgaaagaaagatgaagctgaacactgaggtgagagagattggacctttgtccaaaaagggattctatcttgcctttcaggatgtaggggcttgcatagcattggtttctgtcaaagtgtactacaagaagtgctggaccattgttgagaacttagctgtctttccagatacagtgactggttcggaattttcctccttagtcgaggtccgtgggacatgtgtcagcagtgccgaggaagaggcagaaaattcccccagaatgcattgcagtgcagaaggagagtggctagtacccattggaaaatgcatctgcaaagcaggctatcagcaaaaaggggacacttgcgaaccctgtggccgcaggttctacaaatcttcctctcaggatctccagtgttctcgttgtccaacccacagcttctctgaccgagaaggatcatccaggtgtgaatgtgaagatgggtactacagagctccttctgatccaccatacgttgcatgcacgaggcctccctctgcaccacagaaccttattttcaatatcaatcaaacgactgtaagtttggaatggagtcctccggctgacaacgggggaagaaacgatgtcacctacagaatactgtgtaagcggtgcagttgggaacagggagaatgtgtgccatgcggaagtaacattggatacatgccccagcagacgggattagaggataactatgtcactgtcatggacctacttgcccatgcaaattacactttcgaagttgaagctgtaaatggagtttcggacttaagcagatcccagaggctcttcgctgctgttagcatcaccaccggtcaagcagctccctcgcaagtgagtggagtcatgaaggagcgagtactgcagcggagtgtgcagctttcctggcaggagccggagcatcccaatggagtcatcacggaatatgaaatcaagtattatgagaaagatcaacgggaaaggacgtactcaacactcaaaaccaagtccacctccgcctccattaataatctgaaaccgggaacagtgtacgtctttcagatccgggcggtcactgctgccggttatggaaactacagccctaggcttgatgttgccacacttgaggaagcttcaggtaaaatgtttgaagcgacagcagtctccagtgaacagaatcctgtcatcataattgctgtagtggctgtagcagggaccatcatcttggtgttcatggtgttcggcttcatcattggaagaaggcactgtggttatagcaaggctgaccaagaaggggatgaagaactctactttcattttaaatttccaggcaccaaaacctacattgaccctgaaacctatgaggacccaaatagagctgtccatcaattcgccaaggagctagatgcctcctgtattaaaattgagcgtgtgattggtgcaggagaatttggagaagtttgcagtggtcgtttgaaacttccgggccagagagatgttgcagtggccataaaaaccctgaaagttggttacacagaaaagcaaaggagggactttttatgcgaagcaagcatcatggggcaatttgaccacccaaatgtcgtccatttggaaggggttgttacaagagggaagcctgtcatgattgtgatagagttcatggagaatggagccctggatgcatttctcaggaaacacgatgggcagtttacagtcattcagttggtaggaatgttgagaggtattgccgctgggatgcgatacttggctgatatgggatacgttcacagggaccttgcagcgcgcaacatccttgtcaacagcaatcttgtttgtaaagtgtcagattttggcctttcccgggttatagaggatgatcccgaagctgtctacaccacgactggtggaaaaattccagtaaggtggactgcaccggaagccattcaataccggaagttcacctcagccagcgatgtgtggagctatgggattgtcatgtgggaagtgatgtcttatggagaaagaccttactgggacatgtcaaatcaagatgtcattaaagcgatagaagaaggttatcgtttgccggcgcccatggattgcccagctggtcttcaccagctaatgctggattgttggcagaaagatcgggcggaaaggccaaagtttgagcagatagtcggaattctagacaaaatgattcgaaacccaagtagtctgaaaacacccctgggaacttgtagtagacccttaagccctcttctggaccagagcactcctgacttcactgccttctgttcagttggagaatggttgcaagctattaaaatggaaaggtataaggacaacttcacagcagcgggttacaactcactcgagtcagtggccaggatgactatcgatgatgtgatgagtttagggatcacactggttggccatcaaaagaagatcatgagcagcatccagactatgcgggcacaaatgttgcatttacacggaacaggcatccaagtgtgacacatcggcctccctcagatgaggcttaagactgcaggagaacagttctggccttcagtatacgcatagaatgctgctagaagacagttgatatactgggtccttcctacaagaaagagaagattttagaagcacctccagacttgaactcctaagtgccaccagaatatacaaaaagggaatttaggatccaccactggtggccaggaacacagcagagacaataaacaaagtactacctgaaaaacatcccaacaccttgagctctcgaacctcctttttatcttatagactttttaaaaatgtacataaagaatttaagaaagaatatatttgtcaaataaaaatcatgatcttattgttaaaatcaatgaaatattttccttaaaatatgtgatttcagactattcttttccagaaccatctgtgtttattctgcttaaggactttgttttagaaagttatttgtagctttggacctttttagtgttaaatttatgacacgttactacactgggaacctttgaagactctcaaacttaaaggaaagcaaaactacgcacatagtcgaggatggactttgtccttcatggctttggtatcctggctgtgtcattttgttaaaccagtgatgttttcatattgtttgctgattggcaggtagttcaaaattgcaagttgccaagagctctgatattttttaacaggatttttttttctttgtaaaaatcagataacatactaacttttcaatgaaaaaaaaaaaaaaagaagcaataatgatccataaatactataaggcacttttaacagattgtttatagagtgatttactaggcagaatttaataaaaaaaaaagagagatgtcaaattttaggtttatgtgtatatgataaaaggctgagcttcgtctgaagatgctggtgaaagcaagactggaagcgaagctctccagctttggctaacccaatccgagcacatcaagagcttcagtcttgtgacagtaagaaatttaggaacatagttgacctatattttgtattctttcttgttgaatgcagtccaaatacaaaa

SEQ ID NO: 73 - DNA, 4996 bp, human
gcgccggggtgtgcgcccggccgggtgtgcggagagcgagggagcgcgctccctcccgacgcgcgggccgcagcggccaagcccgagggtgcgtggcgcccccgcccgcccggcccggcccggccatggcccccgcccggggccgcctgccccctgcgctctgggtcgtcacggccgcggcggcggcggccacctgcgtgtccgcggcgcgcggcgaagtgaatttgctggacacgtcgaccatccacggggactggggctggctcacgtatccggctcatgggtgggactccatcaacgaggtggacgagtccttccagcccatccacacgtaccaggtttgcaacgtcatgagccccaaccagaacaactggctgcgcacgagctgggtcccccgagacggcgcccggcgcgtctatgctgagatcaagtttaccctgcgcgactgcaacagcatgcctggtgtgctgggcacctgcaaggagaccttcaacctctactacctggagtcggaccgcgacctgggggccagcacacaagaaagccagttcctcaaaatcgacaccattgcggccgacgagagcttcacaggtgccgaccttggtgtgcggcgtctcaagctcaacacggaggtgcgcagtgtgggtcccctcagcaagcgcggcttctacctggccttccaggacataggtgcctgcctggccatcctctctctccgcatctactataagaagtgccctgccatggtgcgcaatctggctgccttctcggaggcagtgacgggggccgactcgtcctcactggtggaggtgaggggccagtgcgtgcggcactcagaggagcgggacacacccaagatgtactgcagcgcggagggcgagtggctcgtgcccatcggcaaatgcgtgtgcagtgccggctacgaggagcggcgggatgcctgtgtggcctgtgagctgggcttctacaagtcagcccctggggaccagctgtgtgcccgctgccctccccacagccactccgcagctccagccgcccaagcctgccactgtgacctcagctactaccgtgcagccctggacccgccgtcctcagcctgcacccggccaccctcggcaccagtgaacctgatctccagtgtgaatgggacatcagtgactctggagtgggcccctcccctggacccaggtggccgcagtgacatcacctacaatgccgtgtgccgccgctgcccctgggcactgagccgctgcgaggcatgtgggagcggcacccgctttgtgccccagcagacaagcctggtgcaggccagcctgctggtggccaacctgctggcccacatgaactactccttctggatcgaggccgtcaatggcgtgtccgacctgagccccgagccccgccgggccgctgtggtcaacatcaccacgaaccaggcagccccgtcccaggtggtggtgatccgtcaagagcgggcggggcagaccagcgtctcgctgctgtggcaggagcccgagcagccgaacggcatcatcctggagtatgagatcaagtactacgagaaggacaaggagatgcagagctactccaccctcaaggccgtcaccaccagagccaccgtctccggcctcaagccgggcacccgctacgtgttccaggtccgagcccgcacctcagcaggctgtggccgcttcagccaggccatggaggtggagaccgggaaaccccggccccgctatgacaccaggaccattgtctggatctgcctgacgctcatcacgggcctggtggtgcttctgctcctgctcatctgcaagaagaggcactgtggctacagcaaggccttccaggactcggacgaggagaagatgcactatcagaatggacaggcacccccacctgtcttcctgcctctgcatcaccccccgggaaagctcccagagccccagttctatgcggaaccccacacctacgaggagccaggccgggcgggccgcagtttcactcgggagatcgaggcctctaggatccacatcgagaaaatcatcggctctggagactccggggaagtctgctacgggaggctgcgggtgccagggcagcgggatgtgcccgtggccatcaaggccctcaaagccggctacacggagagacagaggcgggacttcctgagcgaggcgtccatcatggggcaattcgaccatcccaacatcatccgcctcgagggtgtcgtcacccgtggccgcctggcaatgattgtgactgagtacatggagaacggctctctggacaccttcctgaggacccacgacgggcagttcaccatcatgcagctggtgggcatgctgagaggagtgggtgccggcatgcgctacctctcagacctgggctatgtccaccgagacctggccgcccgcaacgtcctggttgacagcaacctggtctgcaaggtgtctgacttcgggctctcacgggtgctggaggacgacccggatgctgcctacaccaccacgggcgggaagatccccatccgctggacggccccagaggccatcgccttccgcaccttctcctcggccagcgacgtgtggagcttcggcgtggtcatgtgggaggtgctggcctatggggagcggccctactggaacatgaccaaccgggatgtcatcagctctgtggaggaggggtaccgcctgcccgcacccatgggctgcccccacgccctgcaccagctcatgctcgactgttggcacaaggaccgggcgcagcggcctcgcttctcccagattgtcagtgtcctcgatgcgctcatccgcagccctgagagtctcagggccaccgccacagtcagcaggtgcccaccccctgccttcgtccggagctgctttgacctccgagggggcagcggtggcggtgggggcctcaccgtgggggactggctggactccatccgcatgggccggtaccgagaccacttcgctgcgggcggatactcctctctgggcatggtgctacgcatgaacgcccaggacgtgcgcgccctgggcatcaccctcatgggccaccagaagaagatcctgggcagcattcagaccatgcgggcccagctgaccagcacccaggggccccgccggcacctctgatgtacagccagcagggcccaggcagccaccaagcccaccccaggtcatgccagcggcagaggacgtgaggggctggcagcaggcagggcggccccaggcctctgccctcctctcaggtgctggaggagctgaaggcttcgccacaggacctggagttatcaggggtcaggcgcctgggaaggggcctttggtggccaccctggtgaggacacctgtcccccagggcaggcaccttctcttttccagagcctggggcctccacgtcacagagtccaacagggacatcactcgcctgcctctgtgtgcgtgcatgtgtgtgtgtggtggggggtgttctcacaaggtcatgggatctcatgtgaacagtgtgtgatcaagtgtgtccaccccttcgggtctcagcatggacgtgtgcatgttatgagcgtgtgcttatccgttaaggctggaggcacatgtgggtgatggtggatgatgtgtcatgaatgaggaggtgtgtgagcagggaactcagtgtgacaccgccaggtccagcacccatgggggcgggggagaggctcacccctacgtccccccacacctggaggctggagccaggggccacttctgaactgcaccagcaccaggcccaccctcgtctctgcctgggtgagcccaccccggctgtatctcaggtctgggtcctccctctagccgaggaggccacctgcagcctccacccggctctcaccgctgcttcaacaggaaaacagggttcccggtcagtccggctggccgccttcatggaggcatcatggcagagcacatgagatgtcctcagctgggcttggctgcctggccagggccgggggctcagcagcctcctctagcctctgatgccttccctccacggcccaggtctcctcactcaaagtcccttcgccaacctttcaatgcccagccctgacacctgccctttgtcccccaggcctaggatcagggaccagaggatcctatcttctcagcacccagcccaccccttcctgtagcatatggggagactaaggcctggagagaggggtgatgccccgtcccaggttgcactgcaaccaagtgtcagagtcggggctccggcctcctgccaaggctcttgtccccatacaccatcccacaagggcgctgggggtggaagtgccctggaagcccctcccctctcacactgacctccccccttacggcccaccagggtatgtaaatatctcttttctaccatgtcagaatattttttcctcactcctgacaatgcaaaaatggtcttcaaagcacataaaaagcacccagggtgagaaagccccatcccgggggccgttggcaggcagggaagcaggaaccccaccgtgtgccccctgccagccccagagggagtggcgagcccagctgcccagccctgccccccctccccatagccagcacagctatcccgcggggacaccagcactgagccccctctccctcctgcaataattcggggagtctcagccccatccaggtgccgcggccagctctctacacctctatatattatattactatatagccgagctgttcttccttcctatggaagtcggaaacatggtcagaacacgatctgggggggggatcctgtcttcctccccaccccaccccactcttacccaatttctgggctctggatcctcacagtcatggaggcaccgtgggcctggcacttgcaaaagtgtggcccctcactctagtgtgtggtccctctcagggtcctggggatctgcctctctgtggtctccatcctgactcttgaacttacccacaataagaataaattctgcctcatcttt

SEQ ID NO: 74 - DNA, 4737 bp, mouse
gaattccgggcgggagaggcaggagcgcgccacgcgcggccgccgggccgagcccgaggagcgcggcgccgcccggccatggcccccgcccgggcccgcctgtcccccgctctctgggtcgtcacggccgcggcggcggccacctgcgtgtccgcggggcgcggcgaagtgaacttgttggatacatcaaccatccatggagactggggctggctcacgtatcccgctcatgggtgggactccatcaacgaggtagacgagtccttccggcccatccacacgtaccaagtatgcaacgtcatgagccccaaccagaacaactggctgcgcacgaactgggtgccccgcgacggcgccaggcgtgtctacgccgagatcaaattcaccctgcgtgactgcaatagcatcccaggggtgttaggtacctgcaaggagaccttcaaccttcactacctggagtctgaccgcgacctgggggccagcacacaagagagccagttcctcaagattgacaccatcgcggcggatgagagcttcacgggcgcagacctgggtgtgcggaggctcaagctgaacacggaggtgcgtggcgtgggtccgctcagcaagcgcggcttctacctggccttccaggacataggtgcctgcctcgccatcctctcactccgaatctactacaagaagtgccccgccatggtacgcaacctggcggccttctcggaggcggttactggggccgactcgtcctcgctggttgaggttcgaggccagtgtgtgcggcactcggaagagcgcgacacacccaagatgtactgcagtgctgagggcgaatggctggtgcccatcggcaagtgcgtgtgcagtgctggctatgaggagcggcgggatgcctgcatggcctgtgagctgggcttctacaagtcagcccccggggaccagctgtgcgcccgatgcccaccccacagccactctgccacccctgcggcccagacctgccgttgtgacctcagctactaccgcgcggccttggacccaccatcggcagcctgcacccggccaccctcagcaccagtgaacctgatctccagcgtaaatggaacgtctgtgaccctcgagtgggcccctcctctggacccaggtggtcgcagcgacatcacctacaacgcagtgtgccgccgctgcccctgggccctgagccactgtgaggcttgtgggagtggaactcgcttcgtcccgcagcagacaagcctggcacaggccagcctgctggtggccaacctgctagcccacatgaactactccttctggatcgaggcagtcaacggtgtctccaacctgagccctgagccccgcagcgctgctgtggtcaacatcaccacgaaccaggcagccccgtcccaggtggtggtgatccggcaggagcgggctgggcagaccagcgtgtcactcctgtggcaggaaccagagcagcccaacggcatcattctggagtacgagatcaagtactacgagaaggataaggagatgcaaagctactctaccctcaaggctgttaccacccgcgccaccgtgtcaggcctcaaaccaggcactcgctacgtgttccaggtccgagcccgcacctcagcaggctgtggccgcttcagccaggccatggaggtggagaccgggaaacccaggccccgctacgacactcggaccatcgtctggatctgcctgacactcatcacgggcctggtggtgctcctcttgcttctcatctgcaagaagaggcactgtggctacagcaaggcgttccaggactcggatgaagagaagatgcattaccagaacggacaggcacccccacctgtcttcttgcccttgaaccaccccccggggaagttcccagaaacccagttctctgcagagccccacacctatgaggaaccaggtcgggcaggccggagctttacccgagagatcgaggcatccaggatccacattgagaagatcataggctcgggggagtcaggagaagtgtgctatgggaggctgcaggtgccaggacagcgggatgtgcccgtggccatcaaggctctcaaagctggctacacagagagacagcgacaagacttcttgagcgaggcagccatcatgggccaatttgatcaccctaacatcatccgccttgagggtgtggtcacccgtggtcgcctggcaatgattgtgactgagtacatggaaaatggctctctagatgccttcctcaggacccacgatgggcagttcaccatcgtgcagctagtgggcatgctcagaggggtgggcgctggcatgcgctacctctcagacctgggctacattcaccgtgacctggctgcccgcaatgtcctggtggatggccgtctggtgtgcaaagtgtcagactttgggctctcaagggctctggaggatgaccccgaagctgcctacaccactgcgggagggaagatccctatccgatggacagcgccagaggccattgctttccgcacgttctcctcagccagtgatgtgtggagctttggtgtggtcatgtgggaggttctagcctatggtgaacgaccctactggaacatgaccaaccaggatgtcatcagctctgtggaggagggttataggctgccagcacccatgggttgcccacgtgccctgcaccagctcatgctggactgctggcacaaggaccgtgcccagcggcctcgcttcgctcatgtcgtgagcgttctggatgccctggtccacagtcccgagagcctcagggccacagccacagtcagcaggtgcccaccccctgccttcgccaggagctgctttgacctccgagcaggtggaagtgggaacggggacctcacagtgggggactggctggactccatccgaatggggcgctaccgggaccacttcgcggctggcgggtactcctcccttggcatggtgcttcggatgaacgcccaggatgtgcgcgccctcggcatcactctcatgggtcaccagaagaagatacttggaagcatccagaccatgagggcccagctgagcagcacccagggacgccgccggcacctctgaccgatggccacttggcactggttataccagctgtcaggggctccacccccccccccccatcagtcagggtagcccccagagcaataccacaggacctagagtgacagaggtcaggcacctgggacaaggaccttggtgctccaggtagagaggacacctgccctctggaagcaggcacaggaccttgtgtcttctagacctggggcctccaacaccagaagccgatggtgacatcactcacctagctgtgggtgcatgcgtgcatgcgtagggttgatggtaggtatgggggtgctccacaaggtcctggcagctgatggaaacaatgtgtactcatgtctctgttccccgccaggccccagcacagacgtgtgcaggtcaccatgagtgtgcttatctgctaagggcaggagcacacgtgtgtgaccgcagataacacgtcataaatgaggaggcgtgacagagtgtgagcaggggatctgagctgacactgcccagttcccaggacctgtggggatcagacagtgcctgcagctggagtttaggctgcttccgaatcacaccagcaccaggcccagtgtccagcctgggtgaatccaccatggcaatacctcaggtccgggactccttcctactttggagggcggggcacctgcagcctctgcctggctcctcctgctattcaacaggaaaacagggttcctggccagtccctctggccaccttccgtagaggatcacagcagagcgtgagatgccctcggtggggcgtgactgcctggccatctgctctcatggctgtgatgcctctgcccaacgtcccactacccatccctgccacccctgcccatgctgggaacaggagcatggggcagactctcaagccccaaacccaccccttcctataccagataggtaatgcccagagacgaggatgccttgcctgaggtcacatgacagccaaatttcagcgttggggccctcatacccccagccatggtctgttccttcccaacctcccctccccagactgctaggatgggaggggcctgggaagctcactcgcacaggctgataaccccttacggcccaccagggtatgtaaatatctttttttctaccatgtcagaatatttttttctcctcacttctgacaatgcaaaaatggtcttcaaagcacatgcaaagctccccgggtgagagagccatcctgggggaggcagggcccaaggagccccggcccagaggacagggcggcccccttccctgcccatccctgcccacagccagcacagcaccccgtgagacaccagcactgagccccctcccttctgcaataattcaggggcttcagccccacccaggtgccgtgcgctgccagctcctgcgcttctatatattatagtactatgtagccgagctgcccttccttcctatggaagtgggaaacatggtcaggacacgaggggtggggacaccttgtcttccaccccaccccactcacccagtgtctgggcttaggatcctcaggcaaggccctggggtggggctcctgggggcctctctgtggttcccatcctgagtctggaatcacttgtgatgagaataaatactgtctcatcttcaaaaaaaaaaaaaaaaaaaa

SEQ ID NO: 75 - DNA, 4528 bp, rat
atggctggggacttgaacctgttggacacatcgaccatccacggagactggggctggctcacatatcctgctcatgggtgggactccatcaacgaggtggacgagtcctttcggcccatccacacgtatcaggtgtgcaacgtcatgagtcccaaccagaacaactggctgcgtacaagctgggtgccccgtgacggcgccaggcgtgtctacgccgagatcaaattcaccctgcgtgactgcaatagcattcctggggtgttgggcacctgcaaggagaccttcaaccttcactacctagagtctgaccgggatctgggggccagcacacaagagagccagttcctcaagattgacaccatcgcagcggatgagagcttcaccggcgcagatctgggcgtgcggaggctcaagctgaacacggaggtgcgtggcgtgggcccgctcagcaagcgcggcttctacctggccttccaggacataggtgcctgcctcgccatcctctcactcagaatctactacaagaagtgtcccgccatggtacgcaacctggcggccttctcggaggcggtaaccggggctgactcgtcctcgctggtagaggttcgaggccagtgtgtgcgacactcagaggagcgcgacacacccaagatgtactgcagtgccgagggcgaatggctggtgcccatcggcaagtgcgtgtgcagtgccggctatgaggagcggcgcgatgcctgtatggcctgtgagctgggcttctacaagtcagcccccggggaccagctgtgtgcccgatgcccaccccacagccattctgccacccctgcggcccagacctgccgttgtgacctcagctactaccgtgcggccttggacccaccatcggcagcctgcacccggccaccctcagcaccggtgaacctgatctccagcgtgaacggaacttctgtgaccctggagtgggcccctcctctggacccaggcggccgcagtgacatcacctacaacgcggtgtgccgccgctgcccctgggccctgagccactgtgaggcttgtgggagtggaactcgctttgtcccgcaacagacaagcctggcgcaggccagcctgctggtggccaacctcctggcccacatgaactactccttctggatcgaggcagtcaacggtgtctccaacctgagccccgagccccgcaacgctgctgtggtcaacatcaccacaaaccaggcagccccgtcccaggtggtggtgatccggcaggagcgggctgggcagaccagcgtgtcactcctgtggcaggagccagagcaacccaacggcatcatactggagtacgagatcaagtactacgagaaggataaggagatgcaaagctactctaccctcaaggctgtcaccacccgcgccaccgtgtcgggcctcaaaccaggcactcgctacatgttccaggtccgggcccgcacctcagcaggctgtggacgcttcagccaggccatggaggtggagaccgggaaacccaggccccgctatgacactcggaccatcgtctggatctgcctgacactcatcacaggcctggtggtactcctcctgcttctcatctgcaagaagaggcactgcggctatagcaaggcattccaggactctgatgaagagaaaatgcattaccagaatggccaagcacccccgcctgtcttcttgcccttgaaccaccccccggggaagctcccagaaacccagttctcggcagagccccacaactatgaggaaccgggccgtgcaggccgaagctttaccagagagatcgaggcctccaggatccacattgagaagatcataggctcgggggagtcaggagaagtatgctatgggaggctgcaggtgccaggacagcgggatgtgcccgtggccatcaaggctctcaaagctggctacacggagaggcagcgccaagacttcttgagagaggcagccatcatgggacaattcgatcatcctaacatcatccgcctggagggtgtggtcacccgtggccgcctggcaatgattgtgactgagtacatggaaaatggctctctggatgccttcctcaggacccacgatggtcagttcaccatcctgcagctagtgggcatgctcaaaggggtgggcgctggcatgcgctacctctcggacctgggctacattcaccgtgacctggccgcccgcaacatcctggtagatggccgtcttgtgtgcaaggtgtcagactttgggctctcaagggctctggaggacgaccctgaggccgcctacaccactgcgggagggaagatccctatccgatggacagcaccagaggccattgccttccgcactttctcctcagccagtgatgtgtggagctttggtgtggtcatgtgggaggtgctggcctatggtgaacggccctactggaacatgaccaatcaggatgtcatcagctctgtggaagagggttataggcttccagcgcccatgggctgcccacgtgccctgcaccaactcatgctagactgctggcacaaggaccgtgcccagcggcctcgcttctctcacgtcgtgagcgttctggaggccctggtccacagccccgagagccttagggccacagctacagtcagcaggtgcccagcccctgcctttgccaggagctgctttgacctccgagcaggcggaaatgggaacggggacctcactgtgggagattggctggattccatccgaatgggccggtaccgggaccactttgcagcgggcgggtactcctcccttggcatggtgcttcacatgaacgcccaggatgttcgtgccctcggcatcaccctcatgggccaccagaagaaaatccttggaagcatccagacaatgaggtcccagctgagctgcactcaggggccacgccggcacctctgacccatggccacttggcactggtcataccaactgtcaggggctctgcgggggggggcccccagcagtcagggtagcccctgagctctgccacaggagagtgacagaggtcaggcacctgggacaaggaccttggtgctttaagtagagaggacacctgccctctggaggaaggcacaggaccttgtgtcttctagagcctggggctccaacaccagacgccaatggtgacatcactcgcctagctgtgggtgcatgcgtgcatgcatacgggtgacggtgtgggcgtgcccctcgaggccctggcggttgatgaaaacaatgcgtaaccatgtctctgttcccccattaggccccagcacagatgtgtgcaggttaccacgcgtgtgcttgtctactagggcaggagccacgtgtgtatggccacagataacacgtcatgaatgaggaggcgtgacagagtgtgagcgacactgcccagttcccaggacctgtgggggaacgcacagtgcctggcggctggagcccaggctgcttccgaatcataccagcaccaggcccaccgtccagcctgggtgaacccaccatggctgtatctcaggtccgggacgccttcctactttgggggctctgcctggctcctcctgctactcaataggaaaacagggttcctggccagtccctctggccgccttccgtagaggatcacagcagagtgtgagatgccctcggtgggccgtgactgcctgaccgtcgctctcatggctgtgatgcctctttccaatgtctcactgcccattcctgctgcccccctgcccatgctgggaacaggagccccaaacccaccccttcctgtaccagataggtatgcccagagaaaaggatgccttgtctgatgtcacatgacaaccaaatttcagagttgggaccctcttccccccccccaaccatggtctattctccccaaccccacccaagacagctaggacgggaggggcctgggagactcatcaccacaggctgatacccctcccccccttacggcccaccagggtatgtaaatgtctttttttctaccatgtcagaatatttttttccctcactcctgacaatgcaaaaatggtcttcaaagcacatacaaagcaccccgggtgagaacgccccatcctaggggaggcagggcccaaagagccccggcccagaggacagggcggccccctcccctgcccatccctgcccacagccagcacagcaccccgcgtgacaccagcactgagccccctcccttctgcaataatcgggggcttcagccccacccaggtgccgcggccagctcctgcgcttctatatattatagtactatgtagccgagctgcccttccttcctatggaagtgggaaacatggtcaggacacgaggggtggggacaccttgtcttccaccacccccactcacccagtgtctgggcttaggatcctcaggcgaggcccctggggtgggtcccccttggggctcctggggcctctctgtggttcccatcctgagtctggaattacttgcgatgagaataaattgtctcatctttgcctgcgca

SEQ ID NO: 76 - DNA, 4869 bp, human
cattctgctggctgcgcggtggcggcggctgtgtgtgcgccgcgccttgccgccccccctggccccccgagcccggggcgcgcgctcccgcccgggccgtccgggccccgcggcgccgcggcccgaggccccgggaagcgcagccatggctctgcggaggctgggggccgcgctgctgctgctgccgctgctcgccgccgtggaagaaacgctaatggactccactacagcgactgctgagctgggctggatggtgcatcctccatcagggtgggaagaggtgagtggctacgatgagaacatgaacacgatccgcacgtaccaggtgtgcaacgtgtttgagtcaagccagaacaactggctacggaccaagtttatccggcgccgtggcgcccaccgcatccacgtggagatgaagttttcggtgcgtgactgcagcagcatccccagcgtgcctggctcctgcaaggagaccttcaacctctattactatgaggctgactttgactcggccaccaagaccttccccaactggatggagaatccatgggtgaaggtggataccattgcagccgacgagagcttctcccaggtggacctgggtggccgcgtcatgaaaatcaacaccgaggtgcggagcttcggacctgtgtcccgcagcggcttctacctggccttccaggactatggcggctgcatgtccctcatcgccgtgcgtgtcttctaccgcaagtgcccccgcatcatccagaatggcgccatcttccaggaaaccctgtcgggggctgagagcacatcgctggtggctgcccggggcagctgcatcgccaatgcggaagaggtggatgtacccatcaagctctactgtaacggggacggcgagtggctggtgcccatcgggcgctgcatgtgcaaagcaggcttcgaggccgttgagaatggcaccgtctgccgaggttgtccatctgggactttcaaggccaaccaaggggatgaggcctgtacccactgtcccatcaacagccggaccacttctgaaggggccaccaactgtgtctgccgcaatggctactacagagcagacctggaccccctggacatgccctgcacaaccatcccctccgcgccccaggctgtgatttccagtgtcaatgagacctccctcatgctggagtggacccctccccgcgactccggaggccgagaggacctcgtctacaacatcatctgcaagagctgtggctcgggccggggtgcctgcacccgctgcggggacaatgtacagtacgcaccacgccagctaggcctgaccgagccacgcatttacatcagtgacctgctggcccacacccagtacaccttcgagatccaggctgtgaacggcgttactgaccagagccccttctcgcctcagttcgcctctgtgaacatcaccaccaaccaggcagctccatcggcagtgtccatcatgcatcaggtgagccgcaccgtggacagcattaccctgtcgtggtcccagccggaccagcccaatggcgtgatcctggactatgagctgcagtactatgagaaggagctcagtgagtacaacgccacagccataaaaagccccaccaacacggtcaccgtgcagggcctcaaagccggcgccatctatgtcttccaggtgcgggcacgcaccgtggcaggctacgggcgctacagcggcaagatgtacttccagaccatgacagaagccgagtaccagacaagcatccaggagaagttgccactcatcatcggctcctcggccgctggcctggtcttcctcattgctgtggttgtcatcgccatcgtgtgtaacagaagacgggggtttgagcgtgctgactcggagtacacggacaagctgcaacactacaccagtggccacatgaccccaggcatgaagatctacatcgatcctttcacctacgaggaccccaacgaggcagtgcgggagtttgccaaggaaattgacatctcctgtgtcaaaattgagcaggtgatcggagcaggggagtttggcgaggtctgcagtggccacctgaagctgccaggcaagagagagatctttgtggccatcaagacgctcaagtcgggctacacggagaagcagcgccgggacttcctgagcgaagcctccatcatgggccagttcgaccatcccaacgtcatccacctggagggtgtcgtgaccaagagcacacctgtgatgatcatcaccgagttcatggagaatggctccctggactcctttctccggcaaaacgatgggcagttcacagtcatccagctggtgggcatgcttcggggcatcgcagctggcatgaagtacctggcagacatgaactatgttcaccgtgacctggctgcccgcaacatcctcgtcaacagcaacctggtctgcaaggtgtcggactttgggctctcacgctttctagaggacgatacctcagaccccacctacaccagtgccctgggcggaaagatccccatccgctggacagccccggaagccatccagtaccggaagttcacctcggccagtgatgtgtggagctacggcattgtcatgtgggaggtgatgtcctatggggagcggccctactgggacatgaccaaccaggatgtaatcaatgccattgagcaggactatcggctgccaccgcccatggactgcccgagcgccctgcaccaactcatgctggactgttggcagaaggaccgcaaccaccggcccaagttcggccaaattgtcaacacgctagacaagatgatccgcaatcccaacagcctcaaagccatggcgcccctctcctctggcatcaacctgccgctgctggaccgcacgatccccgactacaccagctttaacacggtggacgagtggctggaggccatcaagatggggcagtacaaggagagcttcgccaatgccggcttcacctcctttgacgtcgtgtctcagatgatgatggaggacattctccgggttggggtcactttggctggccaccagaaaaaaatcctgaacagtatccaggtgatgcgggcgcagatgaaccagattcagtctgtggaggtttgacattcacctgcctcggctcacctcttcctccaagccccgccccctctgccccacgtgccggccctcctggtgctctatccactgcagggccagccactcgccaggaggccacgggccacgggaagaaccaagcggtgccagccacgagacgtcaccaagaaaacatgcaactcaaacgacggaaaaaaaaagggaatgggaaaaaagaaaacagatcctgggagggggcgggaaatacaaggaatattttttaaagaggattctcataaggaaagcaatgactgttcttgcgggggataaaaaagggcttgggagattcatgcgatgtgtccaatcggagacaaaagcagtttctctccaactccctctgggaaggtgacctggccagagccaagaaacactttcagaaaaacaaatgtgaaggggagagacaggggccgcccttggctcctgtccctgctgctcctctaggcctcactcaacaaccaagcgcctggaggacgggacagatggacagacagccaccctgagaacccctctgggaaaatctattcctgccaccactgggcaaacagaagaatttttctgtctttggagagtattttagaaactccaatgaaagacactgtttctcctgttggctcacagggctgaaaggggcttttgtcctcctgggtcagggagaacgcggggaccccagaaaggtcagccttcctgaggatgggcaacccccaggtctgcagctccaggtacatatcacgcgcacagcctggcagcctggccctcctggtgcccactcccgccagcccctgcctcgaggactgatactgcagtgactgccgtcagctccgactgccgctgagaagggttgatcctgcatctgggtttgtttacagcaattcctggactcgggggtattttggtcacagggtggttttggtttagggggtttgtttgttgggttgttttttgttttttggttttttttaatgacaatgaagtgacactttgacatttcctaccttttgaggacttgatccttctccaggaagaaggtgctttctgcttactgacttaggcaatacaccaagggcgagattttatatgcacatttctggatttttttatacggttttcattgacactcttccctcctcccacctgccaccaggcctcaccaaagcccactgccatggggccatctgggccattcagagactggagtgagatttgggtgtggagggggaggcgccaaggtggaggagcttcccactccaggactgttgatgaaagggacagattgaggaggaagtgggctctgaggctgcagggctggaagtccttgcccacttcccactctcctgccccaatctatctagtacttcccaggcaaataggcccctttgaggctcctgagtgccctcagatggtcaaaacccagttttccctctgggagcctaaaccaggctgcatcggaggccaggacccggatcattcactgtgataccctgccctccagagggtgcgctcagagacacgggcaagcatgcctcttcccttccctggagagaaagtgtgtgatttctctcccacctccttccccccaccagacctttgctgggcctaaaggtcttggccatggggacgccctcagtctagggatctggccacagactccctcctgtgaaccaacacagacacccaagcagagcaatcagttagtgaattgaatggaaataaacgctttagttataatatga

SEQ ID NO: 77 - DNA, 4780 bp, mouse
tgcgccgcgccccgccgctccccgccggccccccgagcccggggcgcgcgctccagcccgggggtccccgcggcgccgcggccggaggctccgggcagcgcagcaatggccgtgcgcaggctgggggccgcgctgctgctgctgccgctgctagccgccgtggaagaaaccctgatggactctacgacagcaacggctgagctgggctggatggtacatcccccatcagggtgggaagaggtgagcggctacgacgagaacatgaacactatccgtacctaccaggtgtgcaatgtctttgagtcaagccagaacaactggctgcggaccaaattcatccggcgccgcggcgcccaccgcatccacgtggagatgaagttctcggtgcgtgactgcagcagcattcccagcgtgccgggctcctgcaaggagaccttcaacctctactactatgaggctgattttgacttagccaccaaaacctttcccaactggatggagaatccgtgggtgaaggtggacaccatcgcggccgatgagagcttctctcaggtggacctgggtggccgcgtcatgaaaatcaacactgaggtgcgaagcttcggtcccgtgtcccgcaatggtttctacctggccttccaggactatggcggctgtatgtccctcattgctgtgcgcgtcttctaccggaagtgcccccgaatcatccagaatggtgccatcttccaggagacactgtcgggggctgagagcacttcgctggtggcagctcggggcagctgcatcgccaatgctgaagaagtggatgtgcccatcaaactctactgtaacggggacggcgaatggctggtgcccataggtcgctgcatgtgcaaggcgggcttcgaggctgtggagaacggcaccgtctgccgaggttgtccatcaggaaccttcaaggccaaccaaggggacgaagcctgcacccactgtcccatcaacagccgcaccacctccgagggtgccaccaactgtgtatgccgcaacggctactacagggccgacctggaccccttagacatgccttgcacaaccatcccctctgcgccccaggctgtgatctccagcgtcaacgagacgtccctcatgctagagtggaccccaccccgagactcggggggtcgcgaggatcttgtttacaacatcatctgcaagagctgtggctccggccggggcgcatgcacgcgctgcggggacaacgtgcagtacgcgccccgccagctgggcctgactgagccgcgcatctacatcagtgacctgctggcacacacgcagtacaccttcgagatccaggccgtgaacggtgtgactgaccagagtcccttctcacctcagttcgcctctgtgaacatcaccaccaaccaagcagcaccatcggccgtgtccatcatgcaccaggtgagccgcactgtggacagcatcaccctgtcgtggtcccagccagaccagcccaacggtgtgatcctggactacgagctgcagtactatgagaaggagctcagtgagtacaacgccacggccataaaaagccccaccaacacagtcactgtgcagggcctcaaagccggcgccatctatgtcttccaggtgcgggcacgcaccgttgcaggctatgggcgctacagtggcaagatgtacttccaaaccatgacagaagccgagtaccagaccagcatcaaggaaaagctacccctcatcgttggctcctccgccgccggcttagtcttcctcatcgctgtggtcgtcattgccatcgtatgtaacagacgggggtttgagcgtgccgactcagagtacacggacaagctacaacactacaccagcggacacatgaccccaggcatgaagatctatatagaccctttcacctatgaagatcctaatgaggcagtgcgggagtttgccaaggaaattgacatctcctgtgtcaagattgagcaggtgatcggagcaggggaatttggtgaggtctgcagtggccatttgaagctgccaggcaagagagagatctttgtagccatcaagaccctcaagtcaggatacacggagaaacagcgccgggacttcctgagtgaggcatccatcatgggccagttcgaccaccccaatgtcatccatctggaaggggttgtcaccaagagcacacctgtcatgatcatcactgaattcatggagaacggatctctggactccttcctccggcaaaacgatgggcagttcacagtcatccaactggtgggcatgctgaggggcattgcagccggcatgaagtacctggcggacatgaactacgtgcaccgtgaccttgctgctcgaaacatcctcgtcaacagcaacctggtgtgtaaggtgtctgattttgggctctcacgcttcctggaggatgacacgtctgaccccacctataccagcgctctgggtgggaagatccccatccgttggacggcaccggaagccatccagtaccggaaattcacctcggccagtgatgtgtggagctatggcatcgtcatgtgggaggtgatgtcctacggggaacgaccctactgggacatgaccaatcaagacgtaatcaacgccattgaacaggactacagactacctccgcccatggactgccctagtgccctgcaccagctcatgctggactgctggcagaaggaccgcaaccaccggcccaagttcggccagattgtcaacacgctggacaagatgatccgaaaccccaacagcctcaaagccatggcacccctgtcctctggcatcaacctgccactgctggaccgcacgataccggactacaccagctttaacacggtggatgagtggctagaggccatcaagatgggccagtacaaggagagctttgccaacgccggctttacctctttcgacgttgtatctcagatgatgatggaggacattctccgcgttggggtcactctagctggccaccagaaaaaaatcctgaacagtatccaggtgatgcgggcccagatgaaccagatccagtctgtagaggtttgacattcgcctgcctcggttctcctcttcctccacgccgccccctgagcccccctacatcggtccccctgctgctctgtccactacaaggtcagccacctgccaggaggccacagacaacaggaagaaccaagcagcactccagccaagccgtcaccaagagcccatgcaagtcaaaggaaggaaaaggggattgggtgggggggacacgcacctagatctgggagggggcgggacaggcaagagacgttcgttccaagaggattctcataagggaagtgacggttcttagaggagaaaagcaaaaggcttgggagatccacatggcctgtccccgtgaaggccaaaaagcattttctctccaactccttctgggaaggttgagctggccagagccaagaaacacttccaggaacattaacatgaagggaagaggtgagccaccctccttgcctggccttagccgtttcttggagcatcactaatggcccagcccccaggcacaaggggcagagagacaggcagtcgccccagataggctccggggaagtccattccagctgccaccggcagacaggaggatagttgttctgtcttgggagacggtttccaaaaactccgagagactttctgctaatggttcaggaggcggaagaggagctcctggcctcccaggtcacgccaaacaggctagatcttcctgaggacagccacccaggtctgcagccccacaaggccctgctcctgatcagcctcagccagaggacgaggaggcaggtgactgtcatcagcctcgactgccacagagaagcatactcttgcatctgggtttgtttacagcgattccgtggaccgggggtattttgatcaggggtggttttggtctgggagggttttgtttgttgggtttttttaaaaaaaaatgacaatgaagagacactttgacatttcctaccttttgaggacttgatccttctccaggaagaaggtgctttctgcttactgacttaggcaatacaccaagggcgagattttatatgcacatttctggatttttttatatgcttttcattgatacccttccctcctcccacctgctgccaggcctcaccaaagccaactgtcacagggccacctgggccactcagagacctcagtgggactgggagagtggagggaactacatcagcgcccacactggaccacagacggaggcagatgagggctccaaggccggaagtcctcccttcctccctgtctgctctcatgctctccgccctgttctatctggcacttcccaggcacagaggccccttcaggttcctgggtgctcttcaatggccaaaactcgatttcatgtctgggagcctggaccaggctacccgggaagtcaggaccctgatcattcactgtgacaccccagccctccaagggtaccccgggagaccacgtgactctctctctctctctgtctctctctctctctgtctctctctctctctctctctctctgtctctctctctctctgtctctctctgtctctctcccactccttctttccccgaggcctttgcctgggtctgaaggtcttggccagaggaacaccatcatcagtcaaggggtctggccgcaggctcccctgtgagcaaatgcagggaatccgagcagaacaatcggttagtgaattgaatggaaataaatgctttagttataaaa

SEQ ID NO: 78 - DNA, 4610 bp, rat
atggatctctttcactttaagctttatggcttcttctcaccacttactggttctgacactgaaacactgatggactctactacagcaacggctgagctgggctggatggtacatcccccatcagggtgggaagaggtgagcggctacgatgagaacatgaacactatccgtacctaccaggtgtgcaatgtctttgagtcaagccagaacaactggctacggaccaaattcatccggcgccgcggcgcccaccgcatccacgtggagatgaagttctcggtgcgtgactgtagcagcattcccagcgtgcccggctcctgcaaggagaccttcaacctctactactatgaggctgattttgacttagccaccaagacctttcccaactggatggagaatccgtgggtgaaggtggacaccattgcggctgatgagagcttttcccaggtggatctgggtggccgcgtcatgaaaatcaacactgaggtgcgaagcttcggtcccgtgtcccgcaatggtttctacctggccttccaggactacggcggctgtatgtccctcattgcggtgcgcgtcttctaccggaagtgcccccgagtcatccagaatggtgccatcttccaggagacactgtcgggggctgagagcacctcactggtagctgctcggggcagctgcatcgccaacgctgaagaagtggatgtacccatcaaactctactgtaacggggacggcgaatggctggtgcccatcggtcgctgcatgtgcaaggcgggcttcgaggctgtggagaacggtaccgtctgccgaggttgtccatcaggaaccttcaaggccaaccaaggggatgaagcctgtacccactgtcccatcaacagccgtaccacctccgagggtgccaccaactgtgtgtgccgtaacggctactacagggctgacctggaccccttagacatgccttgcacaaccatcccctctgcgccccaggctgtgatctccagtgtcaacgagacgtccctcatgctagagtggaccccgccacgagactcggggggccgtgaggaccttgtttataacatcatctgcaagagctgtggctcaggccggggtgcctgcacgcgctgtggagacaatgtgcagtacgcaccccgccagctaggcctgaccgagccacgcatctacatcagtgacctgctggcacacacacagtacaccttcgagatccaggccgtgaatggtgtcaccgaccagagtcccttctcacctcagttcgcctctgtgaacatcaccaccaaccaagcagcaccgtcggccgtgtccatcatgcaccaggtgagccgcaccgtggacagcatcaccctgtcgtggtcccagccagaccagcccaacggtgtgatcctggactatgaactacagtactatgagaaggagctcagtgagtacaacgccacagccataaaaagccccaccaacacagtcactgtgcagggcctcaaagccggcgccatctatgtcttccaggtgcgggcacgcaccgtcgcaggctatgggcgttacagtggcaagatgtacttccaaaccatgacagaagccgagtaccagaccagcatcaaggaaaagctgcccctcatcgtcggctcctccgctgccggcgtagtcttcgtcatcgccgtggtcgtcattgccatcgtatgtaacagaagacgggggtttgagcgtgccgactcagaatacacggacaagctgcagcactacaccagcggccacatgaccccaggcatgaagatctatattgaccctttcacctatgaagatcctaatgaggcagtgcgggagtttgccaaggaaatcgacatctcctgtgtcaagattgagcaggtgattggagcaggggaatttggtgaggtctgcagtggccacttgaagctgccagggaagagagagatctttgtagccatcaagaccctcaagtcaggatacacagagaaacagcgccgggacttcctgagtgaggcatccatcatgggccagttcgaccaccccaatgtcatccacctggaaggggttgtcaccaagagcacacctgtcatgatcatcactgaattcatggagaacggttccctggactccttcctccggcaaaacgatgggcagttcacggtcatccaactggtgggcatgctgaggggcatcgcagctggcatgaagtacctggcggacatgaactatgtgcaccgggaccttgctgcacgcaacatccttgtcaatagcaacctggtgtgcaaggtgtctgacttcgggctctcacgcttcctggaggacgacacatctgaccccacctacaccagcgctctgggtgggaagatccccatccgttggacagcaccggaagccatccagtaccggaaattcacctcagccagtgatgtgtggagctatggcattgtcatgtgggaggtgatgtcctacggggagcgaccctactgggacatgaccaaccaagacgtaatcaatgccatcgagcaggactaccggctacctccgcccatggactgccccagcgcgctgcaccagctcatgctggattgctggcagaaggaccgcaaccaccggcccaagttcggccagatcgtcaacacgctggacaagatgatccgaaaccccaacagcctcaaagctatggcgcccctgtcctctggtatcaacctgccactactggaccgcacgatacccgactacaccagctttaacacagtggatgagtggctggaggccatcaagatgggccagtacaaggagagctttaccaacgccggcttcacctcttttgacgtcgtatctcagatgatgatggaggacattctccgggttggggtcactctagctggccaccagaaaaaaatcctgaacagtatccaggtgatgcgggcccagatgaaccagatccagtcggtagaggtttgatggtcgcctgcctcggctctcctcgtcctccatgcgcccctaagccccttacgtcggtccccctgctgctctgtccactgcaaggtcagccacctgccagcaggccacaggcaacaggaagaaccaagcagcactccagtcaagccgtcaccaagaacccatgcaagtcaaaggaaggaaaagggaatgggggggacacgcacctagatctgggagggggcgggacaggcaagaaacgtttgttcaaagaggattctcataagaagagtgatggttcttaggggagaaaagcaaaaaggcttgggagacccacatggcctgtcccggtggaggccaaaagcattttctctccaactccttctgggaaggttgagctggtcagagccaagggggaaaaaaaaatgcttccaggaacattaacatggagggaagaggtgggccaccctccttgcctggccttggctgtttcttggagcatcactaatggcccagtcccaggcacaaggggcagagagacaggcagtcgccccaaataagctctggggaagtccattccagtcgccaccggcagacagaacagttctgtcttgggagccggtttcaaaaactccgagggacttttcttctgctaatggttcaggaggcgacacacagaggagctcctggccttccggatcacactgaacaggccagatcttcctgaggacagccacccaggtctgcagccccacaaggccctgccctgcacgggtgcccgctcctgccctgctgcaggtgactgtcttgagcctcgactgccactgagaagcattctcttgcatctgggtttgtttacagcaattcgtggacttgggggtattttgatcaggggtggttttggtctgggagggtttgtttgttgggtttttttaaatgacaatgaagagacactttgacatttcctaccttttgaggacttgatccttctccaggaagaaggtgctttctgcttactgacttaggcaatacaccaagggcaagattttatatgcacatttctggatttttatacgcttttcattgacacccttccctccccgcacctgctgccaggcctcaccaaagccaactgtcacagggccacctgggccattcagagacctcagtgggtctgggggaatggagggagccgcaccaacacccccccccccccgcattggaccccagactgagtgaggcagatgagggcttcctctgcaggaagtcctctcttcctccctgcacattcccatgctctctgccctgttctatctggtacttcccaggcacagaggccccttcaggttcctgggtgctctccgatggccaaaacccaatttcacctctgggagcctggaccaggctacccaggaagtcaggaccctgatcattcactgtgacaccctagccctccaagggtaccccgggagaccatgtgactctctctcccactccttctccctaccccccacccccgcctttgcccaggtctgaaggtcttggccagaggaatatcatcagtcaggggtctggcctcagactctcctgtgagcaaaagcaggagacccgagcagaacaatcggttagtgaattgaacggaaataaatgctttagttataaaatgaccc

SEQ ID NO: 79 - DNA, 4234 bp, human
cgtgagcggcgcagcaagatcccagctcggaccccggacggcgcgcgcccccgaagccccggatcccagtcgggcccgcagctgaccgccagattactgtgcatcccgaatcacgaccacctgcaccctcctgccccggcccgccccccaagtcctcaggcacccagctccccggcgccccggatcctcctggaccggtccgtccagattcccgcgggaccgacctgtccgcatccccaggaccgccgggctcggtgcaccgcctcggtcccggagccgcccgcctggattgcattccctcctctcctggatctcctgggacccgacgcgagcctgccccggagcccgccgagcgcaccctctctcgggtgcctgcagccccgccggcgcggcccggcccggcgcggcccggctcggctcctagagctgccacggccatggccagagcccgcccgccgccgccgccgtcgccgccgccggggcttctgccgctgctccctccgctgctgctgctgccgctgctgctgctgcccgccggctgccgggcgctggaagagaccctcatggacacaaaatgggtaacatctgagttggcgtggacatctcatccagaaagtgggtgggaagaggtgagtggctacgatgaggccatgaatcccatccgcacataccaggtgtgtaatgtgcgcgagtcaagccagaacaactggcttcgcacggggttcatctggcggcgggatgtgcagcgggtctacgtggagctcaagttcactgtgcgtgactgcaacagcatccccaacatccccggctcctgcaaggagaccttcaacctcttctactacgaggctgacagcgatgtggcctcagcctcctcccccttctggatggagaacccctacgtgaaagtggacaccattgcacccgatgagagcttctcgcggctggatgccggccgtgtcaacaccaaggtgcgcagctttgggccactttccaaggctggcttctacctggccttccaggaccagggcgcctgcatgtcgctcatctccgtgcgcgccttctacaagaagtgtgcatccaccaccgcaggcttcgcactcttccccgagaccctcactggggcggagcccacctcgctggtcattgctcctggcacctgcatccctaacgccgtggaggtgtcggtgccactcaagctctactgcaacggcgatggggagtggatggtgcctgtgggtgcctgcacctgtgccaccggccatgagccagctgccaaggagtcccagtgccgcccctgtccccctgggagctacaaggcgaagcagggagaggggccctgcctcccatgtccccccaacagccgtaccacctccccagccgccagcatctgcacctgccacaataacttctaccgtgcagactcggactctgcggacagtgcctgtaccaccgtgccatctccaccccgaggtgtgatctccaatgtgaatgaaacctcactgatcctcgagtggagtgagccccgggacctgggtggccgggatgacctcctgtacaatgtcatctgcaagaagtgccatggggctggaggggcctcagcctgctcacgctgtgatgacaacgtggagtttgtgcctcggcagctgggcctgacggagcgccgggtccacatcagccatctgctggcccacacgcgctacacctttgaggtgcaggcggtcaacggtgtctcgggcaagagccctctgccgcctcgttatgcggccgtgaatatcaccacaaaccaggctgccccgtctgaagtgcccacactacgcctgcacagcagctcaggcagcagcctcaccctatcctgggcacccccagagcggcccaacggagtcatcctggactacgagatgaagtactttgagaagagcgagggcatcgcctccacagtgaccagccagatgaactccgtgcagctggacgggcttcggcctgacgcccgctatgtggtccaggtccgtgcccgcacagtagctggctatgggcagtacagccgccctgccgagtttgagaccacaagtgagagaggctctggggcccagcagctccaggagcagcttcccctcatcgtgggctccgctacagctgggcttgtcttcgtggtggctgtcgtggtcatcgctatcgtctgcctcaggaagcagcgacacggctctgattcggagtacacggagaagctgcagcagtacattgctcctggaatgaaggtttatattgacccttttacctacgaggaccctaatgaggctgttcgggagtttgccaaggagatcgacgtgtcctgcgtcaagatcgaggaggtgatcggagctggggaatttggggaagtgtgccgtggtcgactgaaacagcctggccgccgagaggtgtttgtggccatcaagacgctgaaggtgggctacaccgagaggcagcggcgggacttcctaagcgaggcctccatcatgggtcagtttgatcaccccaatataatccggctcgagggcgtggtcaccaaaagtcggccagttatgatcctcactgagttcatggaaaactgcgccctggactccttcctccggctcaacgatgggcagttcacggtcatccagctggtgggcatgttgcggggcattgctgccggcatgaagtacctgtccgagatgaactatgtgcaccgcgacctggctgctcgcaacatccttgtcaacagcaacctggtctgcaaagtctcagactttggcctctcccgcttcctggaggatgacccctccgatcctacctacaccagttccctgggcgggaagatccccatccgctggactgccccagaggccatagcctatcggaagttcacttctgctagtgatgtctggagctacggaattgtcatgtgggaggtcatgagctatggagagcgaccctactgggacatgagcaaccaggatgtcatcaatgccgtggagcaggattaccggctgccaccacccatggactgtcccacagcactgcaccagctcatgctggactgctgggtgcgggaccggaacctcaggcccaaattctcccagattgtcaataccctggacaagctcatccgcaatgctgccagcctcaaggtcattgccagcgctcagtctggcatgtcacagcccctcctggaccgcacggtcccagattacacaaccttcacgacagttggtgattggctggatgccatcaagatggggcggtacaaggagagcttcgtcagtgcggggtttgcatcttttgacctggtggcccagatgacggcagaagacctgctccgtattggggtcaccctggccggccaccagaagaagatcctgagcagtatccaggacatgcggctgcagatgaaccagacgctgcctgtgcaggtctgacaccggctcccacggggaccctgaggaccgtgcagggatgccaagcagccggctggactttcggactcttggacttttggatgcctggccttaggctgtggcccagaagctggaagtttgggaaaggcccaagctgggacttctccaggcctgtgttccctccccaggaagtgcgccccaaacctcttcatattgaagatggattaggagagggggtgatgacccctccccaagcccctcagggcccagaccttcctgctctccagcaggggatccccacaacctcacacttgtctgttcttcagtgctggaggtcctggcagggtcaggctggggtaagccggggttccacagggcccagccctggcaggggtctggccccccaggtaggcggagagcagtccctccctcaggaactggaggaggggactccaggaatggggaaatgtgacaccaccatcctgaagccagcttgcacctccagtttgcacagggatttgttctgggggctgagggccctgtccccacccccgcccttggtgctgtcataaaagggcaggcaggggcaggctgaggagttgccctttgccccccagagactgactctcagagccagagatgggatgtgtgagtgtgtgtgtgtgtgtgtgtgtgtgcgcgcgcgcgcgcgtgtgtgtgtgcacgcactggcctgcacagagagcatgggtgagcgtgtaaaagcttggccctgtgccctacaatggggccagctgggccgacagcagaataaaggcaataagatgaaaaaaaaaaaaaaa

SEQ ID NO: 80 - DNA, 4164 bp, mouse
agcggcgcagccagataccggctcctaccccggacggcgagcgcacaaggatcccgggatctgagctcggcctcagtggactgtgccccgagaacctgcgaccacctgcgccctccgcttcccgagtcattgggcatcaagccacccagcgccccggatcctcctggaccggtccgtccagattcccgcgggaacgacctgccggcatctacccggagtcccgggttgggcgacacctcggttacagagcagcccgtctgctttgctccccctccctgacgggatctcttggactgtgcgcgagccttcttcctcgggcgtccccagccccgccggcgcggcccggctcggccccccaaccgagcgccccgggctatggccggagcccgcccgccgccggggcttctgccgctgctcgctccgctgctgctgccgctgctgcttcccgccggctgctgggcgctggaagagactctcatggacacgaaatgggtgacgtctgagctggcatggacatctcatccagagagtgggtgggaagaagtaagcggctatgatgaagccatgaatcctatccgcacgtatcaggtgtgtaatgtgcgtgagtcgagccagaacaactggctgcggacgggtttcatctggcggcgggaagtccagcgcgtctacgtggagctgaagttcaccgtaagagactgtaacagcattcccaacatccctggctcctgcaaggaaaccttcaaccttttctactacgaggctgatagcgatgtggcctcagcctcctctcccttctggatggagaacccctacgtgaaagtggacaccattgcgccagatgagagcttctcgcggctcgatgccgggcgtgtcaacaccaaggtgcgcagcttcgggccgctttccaaggctggcttctacttggccttccaggaccaaggtgcctgcatgtcactcatctctgtgcgtgccttctacaagaagtgtgcatccaccactgcaggcttcgcactcttccccgagaccctcacgggggctgagcccacttcgctggtcattgcccccggcacctgcatcgctaacgctgtggaggtctctgtaccactcaagctctactgcaatggcgacggggagtggatggtgcccgtcggtgcctgcacctgcgctactggccatgagccagccgccaaggagtcccagtgccgtgcctgtcctcctgggagttacaaagcaaagcaaggagaagggccctgcctcccctgtccccccaatagccgcaccacctcgccggctgccagcatctgcacctgccataataacttctaccgtgcagactcagactcggccgacagcgcctgcaccacggtgccatctccaccccggggtgtgatctccaatgtgaatgagacctcgctaatcctcgaatggagtgagccccgggaccttggcggacgagatgacctcctttataatgttatctgcaagaagtgccgtgggagctctggggctgggggtccggcaacctgttcacgctgcgatgacaacgtagagtttgtacctcggcagctgggcctgacagagcgccgggtccacattagccacctgttggcccacacacgctacacctttgaggtgcaggctgtcaacggtgtctcaggcaaaagccctttgccaccccgctatgcagctgtgaatatcaccaccaaccaggctgctccatcagaagtgcctacactccacctgcacagcagctcggggagcagcctgaccctgtcctgggcacccccagagcggcctaatggagtcatcttggactatgagatgaagtactttgagaagagtaaaggcatcgcctccactgtaaccagccagaagaactccgtacaactggacgggctgcagcctgatgcccgctacgtagttcaggtccgggctcgcacagtagcgggttacggacagtatagccacccggctgagtttgagaccacaagtgaaagaggttcaggtgcccagcagcttcaagaacagcttcccctgattgtgggatccaccgtagccgggtttgtcttcatggtggtcgtcgtggtcatcgctcttgtctgcctcaggaagcagcgccatggccccgatgcagaatacacagagaagctgcagcaatacattgctcctgggatgaaagtttacattgacccctttacctatgaggatcccaatgaggccgtccgagagttcgccaaggagatcgatgtgtcctgtgtcaagatcgaggaggtgattggagctggggagtttggggaagtgtgccggggtcgactgaaactgcccggccgccgggaggtgttcgtggctatcaagacgctgaaggtgggatacacggagaggcagcggcgggacttcctaagtgaggcttccattatgggtcagtttgaccatcccaatataatccgtctagagggtgtggtcaccaaaagtcgtccagtcatgatcctcactgagttcatggagaactgtgccctggactcctttctacggctcaatgacggacagttcacggtcatccagcttgtgggcatgttacgaggcattgctgctggcatgaagtacttgtctgagatgaactacgtgcaccgtgaccttgctgcccgaaacatccttgtcaacagcaacttggtctgcaaagtctctgactttggcctctcccgcttcctggaggatgacccatcagaccccacctacaccagctccctgggtgggaagatccctatccgctggaccgccccggaggccatagcctatcggaagtttacgtctgccagcgatgtctggagctatgggattgtcatgtgggaggtcatgagctacggagagcgaccctactgggatatgagcaaccaggatgtcattaatgctgtagagcaagactatcggttaccaccccccatggactgccccaccgcgctgcaccagctcatgctggactgttgggtgcgggaccggaacctcaggcccaagttctctcaaatcgtcaacacactagacaaacttatccgcaatgctgccagcctcaaggtcaccgccagtgccccatctggcatgtcccagcccctcctggaccgcacagtcccagattatacgaccttcacgacagtgggtgactggctagatgccatcaagatggggaggtataaagagagctttgtcggtgctgggtttgcatcctttgacctggtggcccagatgactgcagaagatctgctaaggattggggtcactttggctgggcaccagaagaagatcctctgcagtatccaggacatgcggctgcagatgaaccagaccctgcctgtgcaggtctgacactcagctccaacgaggggggggtgcccccccaggactgcacaaggattctgaccagccagctggacttttggatgcctggcctctggctgtggcccagaagatggaagtttgggggaggaccctagctgtgacttctccaggcctgtgctccctcccaggaagtgtgccccaaacctcttcatattgaagatggattagaagagggggtgatgtcccctccccagatgccttggggcccaggcctgcctgctctccagtggggagtcttcacaactcagattgggctgcgcttcagtaatggacgtcctggtagggtcaggtggggataagcctgggttcttcaggccccagccctggcaggggtctgaccccaccaggtaagcagagagtactccctcccccaggaagtggaggaggagactctggggatggggagatatggtgccccatcctgaagccagctggtacctccagtttgcacagggacttgatgggggctgagggccctgcctacccttggtgctgtcataaaagggcaggcaggagcaggctgagaagcagcctgtgcctcccagagactgactcagagagccagagactgtgtgtgtgtgtgtgtgtgtgtgtgtgtgtgtgtgtgtgtgtgtgtgaaagacgggggtgggggtatgtatgtgtgtgttgtgcacatgcttgcctgcacagagagcatgagtgtgtacaagcttggccctgtgccctgtagtggggccagctgggcagacagcaaaataaaggcaataagatgaaaaaaaaaaaaaaaaaaaa

SEQ ID NO: 81 - DNA, 4176 bp, rat
ccgccgctccacggcgaggaccagcagaagtgagtacgtgagcggagcagtctgataccggctcctaccccggacggcgcgctcaccgggagcccgggatccgagctcggcctcagtggactgtgccccgagaaccgcgaccatctgcgccctctgcctcccgagtcatcgggcatcaagccacccagcgccccggatcctcctggaccggtccgtccagattcccgcgggaacgacctgccggcatctaccctgagtaccgggttgggcgacacctcagatacagagccgcccgtctgctttgcgccccctccctgccgggatctcttggactgtgcgcgagccttcttcctcaggcgcccccagccccgccggcgcggcccggctcggcgccccccgagcgctccgggctatggccggagcccgcccgccgccggggcttctgccgctgctcgctccgctgctgctgccgctgctgctgcccgccggctgccgggcgctggaagagactctcatggacacgaaatgggtgacgtccgagctggcatggacatctcatccagagagtgggtgggaagaagtgagcggctacgatgaagccatgaatcctatccgcacgtatcaggtgtgtaacgtgcgcgagtccagccagaacaactggctgcggaccggtttcatctggcggcgggaagtccagcgcgtctacgtggagctgaagtttaccgtgagagattgcaacagcatccccaacatccctggctcctgcaaggaaaccttcaaccttttttactacgaggctgatagcgatgtggcgtcagcctcctctcccttctggatggagaacccctacgtgaaagtggacaccattgcgccagatgagagcttctcgcggctagacgctgggcgcgttaacaccaaagtgcgcagcttcgggccgctttccaaagccggcttctacttggccttccaggaccagggtgcctgcatgtcactcatctctgtgcgcgccttctacaagaagtgtgcatccaccactgcaggcttcgcactcttccccgagaccctcacgggggctgagcccacttcgctggtcattgcccctggcacctgcatcgctaacgctgtggaggtgtctgtaccgctcaagctctactgcaatggcgacggggagtggatggtgcccgttggtgcctgcacctgcgctactggccatgagccagccgccaaggagacccagtgccgcgcctgtccccctgggagctacaaggcaaagcaaggagaggggccctgcctcccctgtccccccaatagccgcaccacctcgccggctgccagcatctgcacctgtcacaataatttctaccgcgcagactcagacacagcggacagcgcctgcaccacggtgccgtctcccccccggggtgtgatctccaatgtgaatgagacctcgctgatcctcgagtggagtgagccccgggaccttggcggacgagatgacctcctttataatgttatctgtaagaagtgccgtggcagctctggggctggaggtccggcgacctgttcacgctgtgatgacaacgtggagttcgagccccgacagctgggcctgaccgagcgccgggtccacatcagccacctgttggcccacacccgctacacctttgaggtgcaggctgtcaacggcgtctctggcaaaagccctttgccgccccgctatgcagctgtgaatatcaccaccaaccaggccgccccatcagaagtgcctacgctccacttgcacagcagttcagggagcagcctgaccctgtcctgggcacccccggagcggcctaacggagtcatcttggactatgagatgaagtactttgagaagagtaaaggcatcgcctccactgtcaccagccagaagaactctgtacaactggacggactgcagcccgacgcccgctatgtagttcaggtccgggctcgcacagtagcaggttacggacagtatagccgcccagctgagtttgagaccacgagtgaaagaggctcaggggcccagcagcttcaagagcagcttcccctaattgtgggatccaccgtagctggctttgtcttcatggtggtcgtcgtggtcattgctcttgtctgcctcaggaagcagcgccagggccctgatgcagaatacacggagaagttgcagcaatacgttgcccccaggatgaaagtttacattgacccctttacctacgaggatcccaatgaggccgtccgagagttcgccaaggagatcgatgtgtcctgcgtcaagatcgaggaggtgattggagctggggagtttggggaagtgtgccggggtcggctgaaactgcccggccgccgggaggtgttcgtggccatcaagacactgaaggtgggatacacggagaggcagcggcgggacttcctgagtgaggcttccatcatgggtcaatttgaccatccaaatataatccgtctagagggcgtggtcaccaaaagtcgtccagtcatgatcctcactgagttcatggagaactgtgccctggactccttcctacggctcaatgacgggcagttcacagtcatccagcttgtgggcatgttgcgtggcattgctgccggcatgaagtacttgtctgagatgaactacgtgcaccgtgacctcgctgcccgcaacatccttgtcaacagtaacttggtctgcaaagtatctgactttgggctctcccgcttcctggaggacgacccctcagaccccacctacaccagctccctgggtgggaagatccctatccgttggaccgccccagaggccatagcctatcggaagttcacgtctgccagcgatgtctggagctacgggatcgtcatgtgggaggtcatgagctacggagagcgaccatactgggacatgagcaaccaggatgtcatcaatgccgtagagcaagactatcggttaccaccccccatggactgccccacggcgctgcaccagctcatgctggactgttgggtgcgggaccggaacctcaggcccaagttctcccaaatcgtcaacacgctagacaagcttatccgcaatgctgccagcctcaaggtcatcgccagtgccccatctggcatgtcccagcccctcctagaccgcacggtcccagattatacgaccttcacgacggtgggcgactggctagatgccatcaagatggggaggtataaagagagcttcgtcggtgcgggttttgcctcctttgacctggtggcccagatgactgcagaagatctgctaaggatcggggtcactttggccggccaccagaagaagatcctcagcagtatccaggacatgcggctgcagatgaaccagacactgcccgtgcaggtctgacgctcagctccagcgaggggcgtggccccccgggactgcacaaggattctgaccagccagctggacttttggatacctggcctttggctgtggcccagaagacagaagttcgggggagaaccctagctgtgacttctccaagcctgtgctccctcccaggaagtgtgccccaaacctcttcatattgaagatggattagaagagggggtgatatcccctccccagatgcctcagggcccaggcctgcctgctctccagtcggggatcttcacaactcagatttggttgtgcttcagtagtggaggtcctggtagggtcgggtggggataagcctgggttcttcaggccccagccctggcaggggtctgaccccagcaggtaagcagagagtactccctccccaggaagtggaggaggggactctgggaatggggaaatatggtgccccatcctgaagccggctggtacctccagtttgcacagggacttgttgggggctgagggccctgcctacccttggtgctgtcataaaagggcaggcgggagcaggctgagaagcagcctgtgcctcccagagactgactcagagagccagagacgtgtgtgtgtgtgtgtgtgtgtgtgtgtgtgtgtgtgtgtgtgtgaaagacgggggtggggtatgtatgcgtgtgttgtgcacatgcttgcctgcacagagagcatgagtgtgtacaagcttagccctgtgccctgtagtggggccagctgggcagacagcgaaataaaaggcaataagttga

SEQ ID NO: 82 - DNA, 4369 bp, human
ttccagcgcagctcagcccctgcccggcccggcccgcccggctccgcgccgcagtctccctccctcccgctccgtccccgctcgggctcccaccatccccgcccgcgaggagagcactcggcccggcggcgcgagcagagccactccagggagggggggagaccgcgagcggccggctcagcccccgccacccggggcgggaccccgaggccccggagggaccccaactccagccacgtcttgctgcgcgcccgcccggcgcggccactgccagcacgctccgggcccgccgcccgcgcgcgcggcacagacgcggggccacacttggcgccgccgcccggtgccccgcacgctcgcatgggcccgcgctgagggccccgacgaggagtcccgcgcggagtatcggcgtccacccgcccagggagagtcagacctgggggggcgagggccccccaaactcagttcggatcctacccgagtgaggcggcgccatggagctccgggtgctgctctgctgggcttcgttggccgcagctttggaagagaccctgctgaacacaaaattggaaactgctgatctgaagtgggtgacattccctcaggtggacgggcagtgggaggaactgagcggcctggatgaggaacagcacagcgtgcgcacctacgaagtgtgtgacgtgcagcgtgccccgggccaggcccactggcttcgcacaggttgggtcccacggcggggcgccgtccacgtgtacgccacgctgcgcttcaccatgctcgagtgcctgtccctgcctcgggctgggcgctcctgcaaggagaccttcaccgtcttctactatgagagcgatgcggacacggccacggccctcacgccagcctggatggagaacccctacatcaaggtggacacggtggccgcggagcatctcacccggaagcgccctggggccgaggccaccgggaaggtgaatgtcaagacgctgcgtctgggaccgctcagcaaggctggcttctacctggccttccaggaccagggtgcctgcatggccctgctatccctgcacctcttctacaaaaagtgcgcccagctgactgtgaacctgactcgattcccggagactgtgcctcgggagctggttgtgcccgtggccggtagctgcgtggtggatgccgtccccgcccctggccccagccccagcctctactgccgtgaggatggccagtgggccgaacagccggtcacgggctgcagctgtgctccggggttcgaggcagctgaggggaacaccaagtgccgagcctgtgcccagggcaccttcaagcccctgtcaggagaagggtcctgccagccatgcccagccaatagccactctaacaccattggatcagccgtctgccagtgccgcgtcgggtacttccgggcacgcacagacccccggggtgcaccctgcaccacccctccttcggctccgcggagcgtggtttcccgcctgaacggctcctccctgcacctggaatggagtgcccccctggagtctggtggccgagaggacctcacctacgccctccgctgccgggagtgccgacccggaggctcctgtgcgccctgcgggggagacctgacttttgaccccggcccccgggacctggtggagccctgggtggtggttcgagggctacgtcctgacttcacctatacctttgaggtcactgcattgaacggggtatcctccttagccacggggcccgtcccatttgagcctgtcaatgtcaccactgaccgagaggtacctcctgcagtgtctgacatccgggtgacgcggtcctcacccagcagcttgagcctggcctgggctgttccccgggcacccagtggggctgtgctggactacgaggtcaaataccatgagaagggcgccgagggtcccagcagcgtgcggttcctgaagacgtcagaaaaccgggcagagctgcgggggctgaagcggggagccagctacctggtgcaggtacgggcgcgctctgaggccggctacgggcccttcggccaggaacatcacagccagacccaactggatgagagcgagggctggcgggagcagctggccctgattgcgggcacggcagtcgtgggtgtggtcctggtcctggtggtcattgtggtcgcagttctctgcctcaggaagcagagcaatgggagagaagcagaatattcggacaaacacggacagtatctcatcggacatggtactaaggtctacatcgaccccttcacttatgaagaccctaatgaggctgtgagggaatttgcaaaagagatcgatgtctcctacgtcaagattgaagaggtgattggtgcaggtgagtttggcgaggtgtgccgggggcggctcaaggccccagggaagaaggagagctgtgtggcaatcaagaccctgaagggtggctacacggagcggcagcggcgtgagtttctgagcgaggcctccatcatgggccagttcgagcaccccaatatcatccgcctggagggcgtggtcaccaacagcatgcccgtcatgattctcacagagttcatggagaacggcgccctggactccttcctgcggctaaacgacggacagttcacagtcatccagctcgtgggcatgctgcggggcatcgcctcgggcatgcggtaccttgccgagatgagctacgtccaccgagacctggctgctcgcaacatcctagtcaacagcaacctcgtctgcaaagtgtctgactttggcctttcccgattcctggaggagaactcttccgatcccacctacacgagctccctgggaggaaagattcccatccgatggactgccccggaggccattgccttccggaagttcacttccgccagtgatgcctggagttacgggattgtgatgtgggaggtgatgtcatttggggagaggccgtactgggacatgagcaatcaggacgtgatcaatgccattgaacaggactaccggctgcccccgcccccagactgtcccacctccctccaccagctcatgctggactgttggcagaaagaccggaatgcccggccccgcttcccccaggtggtcagcgccctggacaagatgatccggaaccccgccagcctcaaaatcgtggcccgggagaatggcggggcctcacaccctctcctggaccagcggcagcctcactactcagcttttggctctgtgggcgagtggcttcgggccatcaaaatgggaagatacgaagaaagtttcgcagccgctggctttggctccttcgagctggtcagccagatctctgctgaggacctgctccgaatcggagtcactctggcgggacaccagaagaaaatcttggccagtgtccagcacatgaagtcccaggccaagccgggaaccccgggtgggacaggaggaccggccccgcagtactgacctgcaggaactccccaccccagggacaccgcctccccattttccggggcagagtggggactcacagaggcccccagccctgtgccccgctggattgcactttgagcccgtggggtgaggagttggcaatttggagagacaggatttgggggttctgccataataggaggggaaaatcaccccccagccacctcggggaactccagaccaagggtgagggcgcctttccctcaggactgggtgtgaccagaggaaaaggaagtgcccaacatctcccagcctccccaggtgcccccctcaccttgatgggtgcgttcccgcagaccaaagagagtgtgactcccttgccagctccagagtgggggggctgtcccagggggcaagaaggggtgtcagggcccagtgacaaaatcattggggtttgtagtcccaacttgctgctgtcaccaccaaactcaatcatttttttcccttgtaaatgcccctcccccagctgctgccttcatattgaaggtttttgagttttgtttttggtcttaatttttctccccgttccctttttgtttcttcgttttgtttttctaccgtccttgtcataactttgtgttggagggaacctgtttcactatggcctcctttgcccaagttgaaacaggggcccatcatcatgtctgtttccagaacagtgccttggtcatcccacatccccggaccccgcctgggacccccaagctgtgtcctatgaaggggtgtggggtgaggtagtgaaaagggcggtagttggtggtggaacccagaaacggacgccggtgcttggaggggttcttaaattatatttaaaaaagtaactttttgtataaataaaagaaaatgggacgtgtcccagctccaggggtaaaaaaaaaaaaaaaaaa

SEQ ID NO: 83 - DNA, 4270 bp, mouse
ctcggttcccactttggtttccaccttccttgaccgcgaccggcgcactaaccccggcggcgcgacatccaccaaccactccagggagcgagagagaccgcgagcaatcggcccaccccagccagccagggcgggacccccgaagccccgaagggacccctaactctcagccacgtcccgatctccgcccgcccagcgacggccactgccaggacgtcccccctcaaggctggcctccccgcgcgcgcgcgctgcggcggggacgtgggggccgcacctgagcgcgggtgcctggcgcgcccgcatgggccatcgttgagaggccctcgacggaaagtcccagcagcagagtcggtgtgcacccgcccaggggagggtcagacctgggggggccagggccccccaaactcggatcgcattcagccaaagtgaggcggcgccatggagctccgagcgctgctgtgctgggcttccctcgccactgctttagaagagaccctgttgaacacaaaactggaaacggcggatctgaaatgggtgacttaccctcaggcagagggccagtgggaggagctaagcggcctggatgaggaacagcacagcgtccgcacctatgaggtgtgcgacatgaagcgtccagggggccaggctcactggctgcgcactggctgggtcccaaggcgaggtgctgtccacgtgtatgccacgatacgcttcaccatgatggaatgcctgtccctgccgagggccagtcgctcctgcaaggagacattcactgtcttctattacgagagcgaagctgatacggccacggcccatacgcccgcctggatggagaacccctacatcaaggtggacacagtggccgcagaacatctgactcggaagcgccctggagctgaagccacagggaaagttaatatcaagacgctgcgcctgggtcctctcagcaaagctggcttctacctggctttccaggaccaaggagcctgcatggctctgctctccctgcatctcttttacaagaagtgctcctggctgatcacgaacttgacctacttccccgagacggtgcctcgggagctcgtggtgccggtggcaggtagctgcgtggccaacgcggtccctaccgccaaccccagccccagcctctactgccgggaagatggtcaatgggctgagcagcaggtcacgggctgcagctgcgcgccagggtacgaggctgcggaaagcaacaaagtatgcagagcctgtggccagggaaccttcaagccccaaataggagacgagtcctgcctgccgtgcccagccaacagccactcgaataacattgggtctcctgtctgcctgtgtcgaattgggtattaccgggcccgctcagacccccggagttcaccttgcactaccccaccctctgctccaagaagcgtggttcaccatttgaatggttccaccctgcgcctggaatggagtgctccccttgagtccggaggccgagaggacctcacttatgctgttcgctgccgagagtgccgtcctgggggttcctgcttgccctgtgggggcgacatgaccttcgaccccggtcctcgagacctggttgagccctgggtggcaatccgagggctgcgtcctgatgtcacctatacctttgaggttgctgctttgaatggtgtgtctaccttagccactggaccacctccttttgagcctgtcaatgtcaccactgaccgtgaggtgcctcctgcagtgtctgacatccgagtgactcggtcgtcacccagcagcttgatcctgtcatgggctctccccagagcacccagtggggccgtgctggactacgaggtcaagtatcatgagaagggcgcagagggccccagcagtgttcgtttcctgaagacatcagaaaaccgagctgagctccgggggctgaagcggggagccagctatctggtcccggtacgcgcacggtccgaggctggctacggtcccttcggccaggagcatcacagtcagactcaactggatgagagcgagagctggcgggagcagctggccctgattgcaggcactgcggttgtgggtgtggtcctggtcctggtggtcgtcatcattgcagttctctgcttcaggaagcagagctatgggagggaagttgagtactcggataagcatgggcagtatctcatcgggcacggtaccaaggtctacattgatccttttacttacgaagaccctaatgaggcagtgagggaatttgccaaagagatcgatgtctcctatgtcaagattgaagaggtaattggtgcaggtgagttcggcgaggtgtgccggggtcggctgaaggcaccagggaaaaaggagagctgtgtggccatcaagactctgaagggtggctacaccgagcgccagaggcgtgagttcctgagcgaggcctccatcatgggccagttcgagcatcccaacatcatccgcctcgagggcgtggtcaccaacagtgtgccggttatgatcctcacggaattcatggagaacggagccctggactccttcctgcggctgaacgacgggcagttcacagtcatccagctggtgggcatgctgaggggcatcgcctcgggcatgcggtacctggctgaaatgagctatgtccaccgagacctggctgctcggaacatcttggtcaacagtaacctggtctgcaaggtgtccgactttggcctctccagattcttggaggagaactcctctgatcccacctacacaagttccctgggaggcaagattcccatccgatggaccgcccctgaagccattgccttcaggaagttcacctctgccagtgatgcctggagctatgggatcgtcatgtgggaggtcatgtcttttggggaacggccatactgggacatgagcaaccaggatgtgatcaatgccattgaacaggactaccggctgcctcctcctccagactgccccacctccctccaccagctcatgctggactgttggcagaaggaccggaatgcccggccccgctttccccaggtggtcagcgctctggacaagatgatccggaatcccgctagcctcaaaatcgtggccagggagaatggcggggcctcacatccactcttggaccaacggcagcctcactactctgctttcggttctgtgggcgagtggcttcgagccatcaagatgggaagatacgaggaaagttttgcagcggctggattcggctcctttgaggtggtcagtcagatctctgccgaggaccttctccgaattggagtcactctggcaggacaccagaagaaaatcttggccagtgtgcagcatatgaagtcccaagctaagccaggagcccctggtgggacagggggaccagcccagcagttctgacctccaaggactcaccaccgtggcagattcttctttccgggaggcagagttgggtggggactcacaagatgaccccctccccctcgtcacagccttcccattggattgcactttgaacagagggggtcggagacacaggatttggggaaccgtgccatatgggatcatacatgtgccctccaggcggggaaccccaaactcagagtgagtctttccctcaagactgggcaaagaaacatccctacgtctctaacctcccatcttcccagagggctctctccccaagcgccttccacctcaacgggcatgtccctgcagaccaaagagaaagggtgaccagcctgccaacttgggagtggaaaatgccgtcccaggaggcaggaaggggctgtcaggacccggtgatgtaatcattgggttttgatgtcctgacttgctgtcaccaccaaaggcaatcatttttcccttgtaaatgcccctcccctcatctgccttcatattgaaggttctgaagttttactgttttttattttgttaattttttcctccttcccccctccctccccttcttgtccagattttgtgtgttaaagggcacctggttccactatctcctgttgggaacaaggacccatcgatatgttctagaacagtgccttggaaatgccacagccttagacagttccttcttcctttcctccccccaagtgcccccaagctgtgttgtgtggagggaaggggggtgatgttgtaaaagggacaggaggttggtggtggtcaacagaggcagacaacggtgcttggaaggggattcttaaattatatttaaaaagaaactttttttttttataaaaaaaaaaaaaaa

SEQ ID NO: 84 - DNA, 4364 bp, rat
agtctcaactcggcccagctctggcccagcctgtctccctcgctctgttcggtccccactttggcttctacccgctttgaccgcaaccggcgcactcagcttggcggcgcgagagccacctaccactccagggagcgagcaagatcgcgagcaatcggcctaccccagccagccagggcgggacctccgaagccccgaagggacccctaactctcagccacgtcccgatctccgcccgcccagcgacggccactgccaggacgtccccccttaaggctggcctccccgcgcgcgcgcgctgcggcggggacgtgggggccgcacctgagcgcgggtgcccggcgcgcccgcatgggccatcgctgagaggcccccgacggaaagtcccagctgcagagtcggtgtgcacccgcccaggggagggtcagacctgggggggccagggccccccaaactcggatcgtattcagccaaagtgaggcggcgccatggagctcagagcgctgctgtgctgggcttccctcgccactgctttagaagagaccctgctgaacacaaaactggagacggcagatctgaaatgggtgacttaccctcaggcagaaggccagtgggaggagctaagcggcctggatgaggaacagcacagcgtgcgcacctatgaggtgtgcgatatgaagcgtccagggggccaggcacactggctgcgcactggctgggtcccacggcgaggtgctgtccacgtgtatgccacgatacgcttcaccatgatggaatgtctgtccctgccgagggccagtcgctcctgcaaggagacattcaccgtcttctattatgagagcgaagccgatactgccacggcccacacgccagcctggatggagaacccctacatcaaggtggacacagtggctgcggaacatctgactcggaagcgccctggagctgaagcaacagggaaagttaacatcaagacgctgcgcctgggtcctctcagcaaagccggcttctacctggctttccaggaccaaggagcctgcatggccctgctctccttgcatctcttttacaagaagtgctcccggctggtcacgaacttgacctacttccccgagacggtgcctcgggagctcgtggtgccagtggcaggtagctgcgtggccaatgccgtccctacggccagccccagccccagcctctactgccgggaagatggtcagtgggctgagcagcaggtcacgggctgcagctgcgcgccagggtacgaggccgcggaagggaacaaagtgtgcagagcctgtggccaggggaccttcaagccccaaataggagaagagccctgcctgccatgcccagccaacagccactctaataacattgggtctcctgtctgcctgtgtcggattgggtattaccgggcccgctcggatccccgcagttcgccttgtaccaccccaccctctgctccaagaagcgtagttcaccatctgaatggctcctccctgcgcctggagtggagtgccccccttgagtctggaggccgagaggacctcacttatgctgtacgctgccgagaatgccgtcctgggggttcctgcttgccctgtgggggcgacctgactttcgaccctggtcctcgagacctggttgagccctgggtggcaatccgagggctgcgtcctgatgtcacctatacctttgaggttgctgctttgaatggtgtgtctaccttagccaccggaccacctccttttgagcctgtcaatgtcaccactgaccgtgaagtgcctcccgcggtgtctgacatccgagtcactcggtcctcacccagcagcttgatcctgtcatgggctatccccagagcacccagtggggccgtgctggactacgaggtcaagtatcacgagaagggcgcagagggccctagcagtgtacgtttcctgaagacatcagaaaaccgagctgagctccgggggctgaagcagggagccagctacctggtccaggtccgtgcacggtccgaggccggctatggtccctttggccaagagcatcacagtcagactcaactggatgagagcgagagttggcgggaacagctggccctgatcgcaggcaccgcggttgtaggcgtggtcctggtcctggtggtcattattatcgcagttctttgcctcaggaagcagagcagtgggagggaagtcgagtactccgataaacatgggcaatatctcatcgggcacggtaccaaggtctacattgatccctttacttacgaagaccctaatgaggcagtgagggaatttgccaaagagattgatgtctcctatgtcaagattgaagaggtaattggtgcaggtgagttcggtgaggtgtgccggggtcggctgaaggcaccagggaaaaaggagagctgtgtggccatcaagaccttgaagggtggctacacggagcgccagagacgtgagttcctgagcgaggcctccatcatgggtcagttcgagcatcccaacatcatccgcctcgagggtgtggtcactaacagcgtgcccgtcatgatcctcacagaattcatggagaatggagccctagactctttcctgcggaatctcccagagaggggctgggggcatggctcagtgctggtgggcatgctgagaggcattgcctcaggcatgcggtacctggccgaaatgagctatgtccatcgagacctggccgctcggaacatcctggtcaacagtaacctggtctgcaaggtgtccgactttggcctctccagattcctggaggagaactcctctgatcccacctacacaagttccctgggaggaaagattcccatccgatggaccgcccctgaggccattgccttcaggaaattcacgtctgccagtgatgcctggagctatgggatcgtcatgtgggaggtcatgtctttcggggaacggccatactgggacatgagcaaccaggacgtgatcaatgctattgaacaggactaccggctgccccctcccccagattgccccacctccctccaccagctcatgctggactgttggcagaaggaccggaatgcccggccccgattcccccaggtggtcagcgctctggacaagatgatccggaatcccgctagcctcaaaatcgtggccagggagaatggcggggcctcacatccactcctggaccaacggcagcctcactactctgcttttggttctgtgggcgagtggcttcgagccatcaagatgggaagatacgaggaaagttttgcagcggctggattcggctcctttgaggtggtcagccagatctctgccgaggaccttctccgaattggagtcactctggcaggacaccagaagaaaatcttagccagtgtgcagcatatgaagtcccaagctaagccaggagcccccggtgggacaggaggaccaacccagcagttctgacctccaagggctcaccaccccagagctgaggggggcagagttgggtggggactcacaagatgagcccctccccctcatcacagcttcccattggattgcactttgaacagaaggggtaggagctgttaatcctggagacccagccttgaggaaactgtgccatatgggatgggaagaatcacacgggtgccctccaggcgggaaaccccaaactcaacagtgagtctttccttcaagactgggcaaagaacatccctacgtctctaatctcccatcttcccagagggctctctcctcaagcgtcttccacctcaacgggcatgtccctgcagaccaaagagaaaaggtgaccagcctgccaacttgggagtggaaaatgccgtcccagaaggcaggacggggctgtcaggactcggtgatgtaatcattggattctgatgtcccaacttgctgtcaccaccaaaggcaatcattttcccttgtaaatgctccttccctcatctgccttcatattgaaggttctggagttttactattttttattttgttattttttttcctccttctcttccctccccaccccccttgtccagattttgtgcgttgaagggtacctggttcgactatctcctgttgggaacaaggacccgttgatatgttctagaacagtgcctttgaaatgccatagcctcagacagttagttccttcctccttccctccccctaagtgcccccaagctgtgttgtgagtggagggaagggggggtgatgttgtaaaaggggcaggagggtggtggcggtcaacaggaggcagacaccggtgcttggaagggggttcttaaattatatttaaaaagaaactttttttttttgtataaataaaagaaaacgggatctgtctcagta

SEQ ID NO: 85 - DNA, 4059 bp, human
ggggcgggccgggccggcttgggaggggacgcggagggggcgggccgggctgcgttcgctccagccgcggctctacagcagcgggcggcgggacccgggacccagcttggcgacggcgatctcgacgcgggcccccaggatctcccggcgccccacctctggagcagcccctgccgccagcgtcaggtccaccccggaatcccagggactctcggcgccgaacggacccgggccgggtgcaacggggtccccggactggagaagacgcgggtggcaccgtgcgagctccaggagccccgggtccactgcgaggcctcggggggcgcagacctgcagagactgcggccaacgggaagaaataaagggattatagtccacccaattcacagacttctgagactcagacacgaggagagatagagaaccgccaatctctagatcaacaagcaaaggaggtgccaagcctgtttgtcttcattgtgacactggagtctagatgctgggaagtccaagatcagggtgccggcatggtcagttcctggcgaagcctctcttctaggtttcagactgccctcttctttgttgtgtcctcgaatggcagaaaaaggggtggctgttggaggaagggaggagagtaaatgaagagaaagaactggaataaccccttgcagaaaaaaaaaaaaagggaagcaagcttagctgtacaccctgagtcttgcaaaagctgcagccccacccaggagcagggtggtggctggggcgatggtggacgccctgaagatgtcccatggctactgaaggggctgcccagttagggaacagagtggcgggcatggtgtgtagcctatgggtgctgctcctggtgtcttcagttctggctctggaagaggtattgctggacaccaccggagagacatctgagattggctggctcacctacccaccaggggggtgggacgaggtgagtgttctggacgaccagcgacgcctgactcggacctttgaggcatgtcatgtggcaggggcccctccaggcaccgggcaggacaattggttgcagacacactttgtggagcggcgcggggcccagagggcgcacattcgactccacttctctgtgcgggcatgctccagcctgggtgtgagcggcggcacctgccgggagaccttcaccctttactaccgtcaggctgaggagcccgacagccctgacagcgtttcctcctggcacctcaaacgctggaccaaggtggacacaattgcagcagacgagagctttccctcctcctcctcctcctcctcctcttcttcctctgcagcgtgggctgtgggaccccacggggctgggcagcgggctggactgcaactgaacgtcaaagagcggagctttgggcctctcacccaacgcggcttctacgtggccttccaggacacgggggcctgcctggccctggtcgctgtcaggctcttctcctacacctgccctgccgtgctccgatcctttgcttcctttccagagacgcaggccagtggggctgggggggcctccctggtggcagctgtgggcacctgtgtggctcatgcagagccagaggaggatggagtagggggccaggcaggaggcagcccccccaggctgcactgcaacggggagggcaagtggatggtagctgtcgggggctgccgctgccagcctggataccaaccagcacgaggagacaaggcctgccaagcctgcccacgggggctctataagtcttctgctgggaatgctccctgctcaccatgccctgcccgcagtcacgctcccaacccagcagcccccgtttgcccctgcctggagggcttctaccgggccagttccgacccaccagaggccccctgcactggtcctccatcggctccccaggagctttggtttgaggtgcaaggctcagcactcatgctacactggcgcctgcctcgggagctggggggtcgaggggacctgctcttcaatgtcgtgtgcaaggagtgtgaaggccgccaggaacctgccagcggtggtgggggcacttgtcaccgctgcagggatgaggtccacttcgaccctcgccagagaggcctgactgagagccgagtgttagtggggggactccgggcacacgtaccctacatcttagaggtgcaggctgttaatggggtgtctgagctcagccctgaccctcctcaggctgcagccatcaatgtcagcaccagccatgaagtgccctctgctgtccctgtggtgcaccaggtgagccgggcatccaacagcatcacggtgtcctggccgcagcccgaccagaccaatgggaacatcctggactatcagctccgctactatgaccaggcagaagacgaatcccactccttcaccctgaccagcgagaccaacactgccaccgtgacacagctgagccctggccacatctatggtttccaggtgcgggcccggactgctgccggccacggcccctacgggggcaaagtctatttccagacacttcctcaaggggagctgtcttcccagcttccggaaagactctccttggtgatcggctccatcctgggggctttggccttcctcctgctggcagccatcaccgtgctggcggtcgtcttccagcggaagcggcgtgggactggctacacggagcagctgcagcaatacagcagcccaggactcggggtgaagtattacatcgacccctccacctacgaggacccctgtcaggccatccgagaacttgcccgggaagtcgatcctgcttatatcaagattgaggaggtcattgggacaggctcttttggagaagtgcgccagggccgcctgcagccacggggacggagggagcagactgtggccatccaggccctgtgggccgggggcgccgaaagcctgcagatgaccttcctgggccgggccgcagtgctgggtcagttccagcaccccaacatcctgcggctggagggcgtggtcaccaagagccgacccctcatggtgctgacggagttcatggagcttggccccctggacagcttcctcaggcagcgggagggccagttcagcagcctgcagctggtggccatgcagcggggagtggctgctgccatgcagtacctgtccagctttgccttcgtccatcgctcgctgtctgcccacagcgtgctggtgaatagccacttggtgtgcaaggtggcccgtcttggccacagtcctcagggcccaagttgtttgcttcgctgggcagccccagaggtcattgcacatggaaagcatacaacatccagtgatgtctggagctttgggatactcatgtgggaagtgatgagttatggagaacggccttactgggacatgagtgagcaggaggtactaaatgcaatagagcaggagttccggctgcccccgcctccaggctgtcctcctggattacatctacttatgttggacacttggcagaaggaccgtgcccggcggcctcattttgaccagctggtggctgcatttgacaagatgatccgcaagccagataccctgcaggctggcggggacccaggggaaaggccttcccaggcccttctgacccctgtggccctggactttccttgtctggactcaccccaggcctggctttcagccattggactggagtgctaccaggacaacttctccaagtttggcctctgtaccttcagtgatgtggctcagctcagcctagaagacctgcctgccctgggcatcaccctggctggccaccagaagaagctgctgcaccacatccagctccttcagcaacacctgaggcagcagggctcagtggaggtctgagaatgacgatacccgtgactcagccctggacactggtccgagaagggacatgtgggacgtgagccgggctccaacagcctctgtgagagatgccccacaccaaacccaaccctcccgatggctgcattccctggtcctccgcctctccaccagccccctcctcattaaagggaaagaagggaatttgcaaaaaaaaaaaaaaaaaa

SEQ ID NO: 86 - DNA, 3666 bp, mouse
gagcgactccgatcgtgacaccggcccccgcacgattccccagggccccgcctagggagcagtccctgcttgcagccttgggtcctctcccagaatcccagagactctaagctgcgagcagacgcgggcccctgggaagcgaggtccccagaccagagaggacacgcgcgacgctaggaaagatctgcgaggtgcagatccaccgcgggggcctcggggggcgcagacctgcagagctggaggccggcgggaaggttggctgctggaggaacggtgcagagtaaatgaagagagcaaactggaataactcctaccagacaagaaggcaagcctggctgtagacaccaggtcttctgaaagccatagcagtgcctcagaacagggcagtggccgaggcaatggtgggagtgccgaagagaccgcatggctactgagggcacgactggctcagggagcagagtggtggcgggcatggtgtgcagtctgtggctcctggttctagggtcatcagttctagctctggaagaggtgctgctggataccacaggagagacctctgagattggctggctcacctacccgccaggtgggtgggatgaggtgagtgttctagatgaccagcgccgtctgactcggaccttcgaagcatgccacgttgcagggctccctcctggttctggccaggacaattggctgcagacacactttgtggaacggcgaggggcccagagggcacacatccgccttcacttctctgtacgagcctgttccagcctgggtgtgagtgggggtacctgccgagagaccttcaccctttactaccggcaggctgatgagccagacggccccgacagtattgcggcctggcacctcaaacgctggaccaaagtggacacaattgccgcagatgagagcttccctgcctcctcttcctcttcctcatgggctgtgggaccccacaggaccggtcagcgggtgggactgcagctgaatgtcaaagagcgcagctttggtcctctcactcagcgtggcttctatgtggccttccaggacacaggggcctgcctggcccttgtggcagtcaagctcttctcctacacctgtccctccgtcctgcgtgcctttgcctcttttcctgagacacaggccagtggagctggaggggcttccttagtggcagctgtgggcacctgtgtagctcatgcagaaccagaggaggatggagtaggaggccaggcagggggcagccccccaaggttacactgtaatggcgaaggcaggtggatggtagctgtgggaggctgccgctgccagcctggacaccagcctgctcgtggagacaagctctgccaagcctgccctgagggatcctataaggccctggctgggaatgttccctgttcaccgtgtccagcccgcagccactcccctgaccctgcagccccagtttgcccatgtctccaaggcttctacagggccagttcggacccaccagaggctccctgcactggtcctccatcggctccccgggagctatggtttgaggtgcaaggctcggcactcatgctgcactggcgtctgcctcaggagctgggtggacgaggggatctgctcttcaatgttgtgtgcaaggagtgtggaggtcacggagagcccagcagtggggggatgtgtcgccgctgcagggacgaggtgcatttcgacccccgccagaggggactgactgagagtcgagtgttagttggggggctccgagcacacgtgccatacatcttggaagtgcaggctgtcaatggggtgtctgagctcagccctgaccctccccaggcagcagccatcaatgtcagcaccagccacgaagtcccttctgcagtccctgtgatgcaccaggtgagccgggcagccaacagcatcacagtatcctggccacagcctgagcaaacaaatgggaacatcctcgactaccagctgcgctactatgaccaggcagaagatgaatcctactccttcaccatgaccagtgagaccaacactgccactgtgacacggttgagccctggccacatctatggcttccaggtgcgggcacggactgcagctggccacggcccctatgggggcaaagtctattttcagacattgcctcaaggtgagctgtcctcccagcttccagagaagctgtccttggtgattggttccatcctgggggccttggccttccttctactggcagccatcactgtactggctgtcatcttccagcggaagcgccgtgggaccggctacacagaacaactgcaacaatacagcagcccaggacttggagtgaagtattacattgacccttctacatacgatgacccctgccaggccatcagagagcttgctcgagaggttgaccctacatatatcaagattgaagaagtcattggggcaggttcctttggagaagtgcgtcggggccgactgcaaccccggggaaggagggaacaagctgtggctatccaggccttgtgggcagggggtgctgagagcctgaagatgacctttctgggtcgggcagcactgctgggccagttccagcaccccaatatcctgcggctggaaggtgtagtcactaagagtcggcctgtcatggtgctgacagaactcatggaacttggtcccctggacagctttcttaggcagcgagagggccagttcagtagcctgcagctggtggccatgcagcggggtgtggctgctgccatgcagtacttgtccagctttgcctttgttcaccgagcactctcggcccgaagtgtgctagtgaatagccacctggtgtgtaaggtggcacgtctcggccacagtcctcagggttcaagttccttgcttcgctgggcagccccagaggtcattacacatggaaagtatacaacatctagcgatgtctggagctttggcatactcatgtgggaagtgatgagctatggagaacggccctactgggacatgaacgagcaggaggtactaaatgcaatagagcaagagttccggctgcccccacctccagggtgcccccctggactacatctactgatgctagacacttggcagaaggaccgtgcccgtcggcctcattttgaccagctggtagctgcatttgacaagatgattcgcaagcctgatactctccaggctgaagggggctccggggacaggccttcccaggctcttctgaaccctgtggccttggacttcccttgcctggactctccccaggcctggctttcagccattggactagagtgctaccaggacaacttctccaagtttggtctttccaccttcagtgatgtggctcagctcagcctggaagacctgccaggcctgggcatcaccctagctggccaccagaagaaacttctgcacaacattcagctcctccagcagcacctgaggcagccaggctcagtggaagtgtaaagcctgctcaggagtctgtgagccgccgatgccccaacccagtcctggccatagggtggagaaggggcgtgtgagactgagtcaggctctactccagcttccatgcctgtcacattaaacccagccctctggacattgcacccccaaatcctgctcttccaacagcctcccccatattaaagggaaagaagggaattt

SEQ ID NO: 87 - DNA, 4067 bp, rat
gatgctccggcgcgagctacaggattttaaacacgccttgcagcggcgcccactggccacctcctcccggaccctaactcgtgcagtccttctgcccacgtcccctccgcccgccaggacccacgggaggaggccgaccctcctcagcacacaggcgggcccagggcgcgcccagcatctccactgcacgccccgctggggatcgggcgccgcgcacttgggtcctaggcccagagggcgggctcggctcccggaagaggagagccagggcggcagaaggggccggagaggggcgggccaggctgggagggacgagagggggcgggcccggctgcgtttgcccagccagcgcttcggagcagcgggcgtccgaacccaagagcagagctcagcgactccgatcgtgacaccggcccccgcacgattccccagggccccgcctagggagcagtccctgcttgcagcctcgggtcctctcccagaatcccagagactccaagctgcgagcagacgcgggccgctgggaagcgaggtcctcagaccagagaggacacgcgcgacgctaggaaagatctgcgaggtgcagatccaccgcgggggcctcgggggcgcagacctgcagagctggaggccggcgggaaggttggctgctggaggacaggtgcagagtaaatgaagagctcaaactggaataactccttccagacacaaagggaaacaagcttgtctgtagacaacgggtcttccgaaaaccacagctgcgcctcagaacagggcagtggccgaggcaatggtgggagtgccgaagacaccgcatggcttctgagaacacggctgggtcagggagcagagtggcgggcatggtgtacagtctatggctcctggttctggggccctcagttctagctctggaagaggtgctgctggataccacaggagagacctctgagattggctggctcacctacccaccaggtgggtgggatgaggtgagtgttctagacgaccagcgccgtctgactcggaccttcgaagcatgccacgtcgcagggctccctcccggttctgggcaggacaattggctacagacacactttgtggagcggcgaggggcccagagggcacacatccgtcttcacttctctgtgcgagcctgttccagcctgggcgtgagtggaggtacctgccgagagaccttcaccctttactaccggcaggctgatgaaccagacagccctgacagtatttcggcctggcacctcaaacgctggaccaaagtggacacaatcgcagcagatgagagcttccctgcctcctcttcctcttcctcctgggctgtgggaccccacaggactgatcagcgggtgggactgcagctgaatgtcaaagagcgcagttttggtcctctcactcagcgtggcttctacgtggccttccaggacacaggggcctgcctggcccttgtagcagtcaagctcttctcctatacctgtccctccgtcctgcgcgcctttgcctcttttcctgagacacaggccagcggagctggaggtgcctccttagtagctgctgtgggcacctgtgtagctcatgcggaacccgaggaggatggcgtaggaggccaggcagggggcagcccaccaaggttacactgtaatggggaaggaaggtggatggtagctgtgggaggctgtcgctgccagcctggacaccagcctgctcgtggagacaagctctgccaagcctgccctgaggggtcctataaggcactgcctggaaatgtcccctgctcaccgtgtccagcccgcagccactcccctgaccctgcagccccagtttgtccctgtctccaaggtttctacagggccagttctgacccaccagaggctccctgcactggtcctccatcagctccccgggagctttggtttgaggttcaaggctcagcacttatgctgcactggcgcctgcctcaggagctgggcggacgaggggacctgctcttcaatgttgtgtgcaaggaatgtggaggtcacaaggagcccagcagtgggggaatgtgtcgccgctgcagggatgaggtgcatttcgacccccgccagaggggcctgaccgagagtcgagtgttagttggtgggctccgagcacacgtgccatacatcttggaagtgcaggctgtcaatggggtgtctgagctcagccctgaccctccccaggcagcagccatcaatgtcagcaccagccatgaagttccttctgcagtccctgtgatgcaccaggtgagccgggccgccaacagcatcacagtgtcctggccacagcctgaacaaacaaatggaaacatccttgactatcagctgcgctactatgaccaggcagaagatgaatcccactccttcaccatgaccagtgagactaacactgccactgtgacacggttgagccctggccacatttatggcttccaggttcgagcacggactgcggctggccatggcccctatgggggcaaagtctattttcagacactgcctcaaggtgagctgtcctcccagcttccagagaagctgtccttggtgattggttccatcctgggggccttggccttccttctactggcagccatcactgtactggctgtcatcttccagcggaagcggcgtgggaccggctacacagaacaactgcaacagtacagcagcccaggacttggagtgaagtattacattgacccttccacgtatgacgacccctgccaggccatcagagagcttgctcgagaggttgaccctacatatatcaagattgaggaagtcattggggcaggttcctttggagaagtgcgtcggggccgactgcaaccccggggaaggcgggaacaggctgtggctatccaggccctgtgggcagggggtgctgagagcctgaagatgacctttctgggtcgggcagccctgctgggccagttccagcaccccaatatcctgcgcctggaaggtgtagtcactaggagtcggcctgtcatggtgctgacagaactcatggagcttggtcccctggacagcttccttaggcagcgagagggccagttcagtagcctgcagctggtggccatgcagcggggtgtggctgctgccatgcagtacctgtccagctttgcctttgttcaccgagcactctcagcccgaagtgtgctagtgaatagccacctggtgtgtaaggtggcccgtcttggccacagtcctcagggttcaagttccttgcttcgctgggcagccccagaggtcatcacacacgggaagtacacaacatctagcgatgtctggagctttggcatactcatgtgggaagtgatgagctatggagaacggccctactgggacatgagtgaccaggaggtactaaatgcgatagagcaagagttccggctgcccccacctccggggtgccctactggactacatctgctgatgctagacacttggcagaaggaccgtgcccgtcggcctcactttgaccagctcgtagccgcgtttgacaagatgatacgcaagcctgataccctccaggctgaagggagctccggggacaggccttcccaggctcttctgaaccctgtggccttggactttccttgcctggactctccccaggcctggctttcagccattggactagagtgctaccaggacaacttctctaagtttggtctttccaccttcagtgatgtggctcagctcagccttgaagacctgccaggcctgggcatcaccctagctggccaccagaagaaactactgcataacatccagctcctccagcagcacctgaggcagccaggctcggtggaagtgtaaagcctggtcagcaatctgtgagctgccgctgatgccccaacccagccctggccatagggtggaggaggggcgtgtgagactgagccagactctattccagcctccatgcctgccacattaaacccagccctctggacattgcacccccaaatcctgctcttccaacagcctcccccatattaaagggaaagaagggaatttataagttga

SEQ ID NO: 88 - DNA, 1474 bp, mouse
gagatttgtgatcgtggtgcctactgtaccgtggagaagcctgtgggaaccttacactgcagagctctcgtcctggcctggctcggcccggccccgcgctatggagttcctttgggcccctctcttgggtctgtgctgcagtctggccgctgctgaccgccacatcgtcttctggaacagttcaaatcccaagttccgtgaggaggactacacggtgcacgtgcagctgaatgactacctagacatcatctgcccacattacgaggacgactctgtggcagatgcagccatggagcgatacacactgtacatggtggaacaccaggagtatgtggcatgccaaccccagtccaaggaccaggtccgttggaattgcaaccggcccagtgccaagcatggcccggagaagctgtctgtgaaattccagcgcttcacgccttttatcttgggcaaggagttcaaggaaggacacagctactactacatctccaaacctatctaccatcaggaatcccagtgcttgaagctgaaggtgactgtcaatggcaaaatcactcataatccccaggcccatgtcaacccacaggagaagagactccaagcagatgacccggaagtacaggttttgcacagcattggttacagtgccgccccccgcctcttcccactggtctgggcagtattgctcctaccactgctgctgctgcaatctcagtgagggtgtacgcttgccctggcttatggattggaatgggactaaggggcagccccagccctgggaacctctcccactacacccacaagacgccaccatgaagcctcaaaaggttcagtattaagggttttaaccgaaaagagtttaaccagcccaactgtgccatccctgcctccacttcagagggatggagaaagaagtggagaaggtccttaacctgcagtttctgcctttaagccaaagaaacaagctgtgcggacctggcccattaagaggcctcagtgggagaagggctaaaaagagcctgaggtcatgcggttggacactgaacttggtaaagacgtccttccccaaggaagccataatgtgcagatgaactgaccgaaggaaaagcttgagacagcttcctgcgggggagccaggtacagaagaggcagcttgggctgacccagcatctctgcaagatttccacctgctgggctgccagagaggtttgtagcccggccctgactgcatcctccccatccctggggcaacattccctggagctgtgccaacaggaggactgaagcagcctggttttagagtgtagctgtaagggcagtgcccgtgtgtacagtctgtggagtttagcttaacgggcagggcccacatgtacagtgtctgtatataaatgtgctgtatctgttcatttctatgactgcagggtttttttatacagtgtttttggattcataataaattgatggttttttatgg

SEQ ID NO: 89 - DNA, 1590 bp, human
gccagatctgtgagcccagcgctgactgcgccgcggagaaagccagtgggaacccagacccataggagacccgcgtccccgctcggcctggccaggccccgcgctatggagttcctctgggcccctctcttgggtctgtgctgcagtctggccgctgctgatcgccacaccgtcttctggaacagttcaaatcccaagttccggaatgaggactacaccatacatgtgcagctgaatgactacgtggacatcatctgtccgcactatgaagatcactctgtggcagacgctgccatggagcagtacatactgtacctggtggagcatgaggagtaccagctgtgccagccccagtccaaggaccaagtccgctggcagtgcaaccggcccagtgccaagcatggcccggagaagctgtctgagaagttccagcgcttcacacctttcaccctgggcaaggagttcaaagaaggacacagctactactacatctccaaacccatccaccagcatgaagaccgctgcttgaggttgaaggtgactgtcagtggcaaaatcactcacagtcctcaggcccatgacaatccacaggagaagagacttgcagcagatgacccagaggtgcgggttctacatagcatcggtcacagtgctgccccacgcctcttcccacttgcctggactgtgctgctccttccacttctgctgctgcaaaccccgtgaaggtgtatgccacacctggccttaaagagggacaggctgaagagagggacaggcactccaaacctgtcttggggccactttcagagcccccagccctgggaaccactcccaccacaggcataagctatcacctagcagcctcaaaacgggtcagtattaaggttttcaaccggaaggaggccaaccagcccgacagtgccatccccaccttcacctcggagggatggagaaagaagtggagacagtcctttcccaccattcctgcctttaagccaaagaaacaagctgtgcaggcatggtcccttaaggcacagtgggagctgagctggaaggggccacgtggatgggcaaagcttgtcaaagatgccccctccaggagagagccaggatgcccagatgaactgactgaaggaaaagcaagaaacagtttcttgcttggaagccaggtacaggagaggcagcatgcttgggctgacccagcatctcccagcaagacctcatctgtggagctgccacagagaagtttgtagccaggtactgcattctctcccatcctggggcagcactccccagagctgtgccagcaggggggctgtgccaacctgttcttagagtgtagctgtaagggcagtgcccatgtgtacattctgcctagagtgtagcctaaagggcagggcccacgtgtatagtatctgtatataagttgctgtgtgtctgtcctgatttctacaactggagtttttttatacaatgttctttgtctcaaaataaagcaatgtgttttttcggacatgcttttctgccactccatattaaaacatatgaccattgagtccctgctaaaaaaaaaaaaaaaaaaaaaaaaaa

SEQ ID NO: 90 - DNA, 1485 bp, rat
gccagtgggaaccttacactgcggagctttcgtcctggcctggcccggcccggccccgcgctatggagttcctttgggcccctctcttgggtctgtgctgcagtctggccgctgctgaccgccacatcgtcttctggaacagttcaaatcccaagttccgagaggaggactacaccgtgcacgtgcagctgaatgactatctggacatcatctgcccacattacgaggacgactctgtggcagatgctgccatggagagatacacgctgtacatggtggaacaccaggagtatgtgacatgcgagccccagtccaaggaccaggttcgctggaagtgcaaccagcccagtgccaagcacggcccggagaagctgtctgagaaattccagcgcttcacgcctttcaccttgggcaaggagttcaaggaaggacacagctactactacatctccaaacctatctaccatcaggaaacccagtgcctgaagttgaaggtgactgtcaatggcaaaatcactcacagcccccacgcccatgccaacccacaggagaagagactccaagcagatgacccggaagtgcaggttttgcacagcattggtcacagcgccgccccccgcctcttcccattggtctgggcagtattgctcctaccactgctgctgctgcaaactcagtgaaggtatttgcttgccctggcttacggattggaacgggactaaggggcagggttaagcacccccaaagccccagccctgggaacctctcccactacacgcacaagacgccaccacgaagcctcagaaaggttcagtattaagggttttaaccgaaaggagttcaaccagcccaactgggccatccctgcctccacttcagagggatggagaaagaagtggagaaggtcctttccctgtggtttctacctttaagccaaagaaacaagctgtgcggacctggcccattaagagcacccactgggagatgcgctgaaagagcctgaggccatgcagttggacactgaacttggtaaaaatgtccttccccaaggaagccataatgtgcagatgaactgaccaaaggaaaagcttgagacagcttcctgcggggaagccaggtacaagagagacagcttgggctgacccagcatctctgcaagatttccacctgctgggctgccagagagttttgtagcccggcactgactgcatcctccccttccctggggcagcattccctgaagctgtgccagcaggaggactatagcagcctggttttggagtatagctgtaagggcagtgcccatgtgtatagtctgtggagtttagcttaaagggcagggcccacatgtacagtgtctgtatataaacgtgctgtctgttcatttctacgactggaggttttttatacagtgttcttggattcataataaagtgatgtttttggttttttaaaaaaaaaaaaaaaaaaaaaaaaaaaaaaaaa

SEQ ID NO: 91 - DNA, 1766 bp, mouse
ggggagcccccgcgcccggggaacccgggagagcgccttgcgcagtgcaccgctcgggcctctgccccgcgccgccgtcgccgccgccgccgccgccgccgccgccgcctggtttctcggcgcccgcggtctacggcgggggccgcgcgcagaggcggggcggcagatctccaagcgcgcgcggcgctccgcccgctcggcggcggaggcggaggcggagacggcggggccaggcggcggctggagagcgagggagcgagcgcggcggcagcaccggggccatggcgcccgcgcagcgcccgctgctgccgctgctgctgctgctgctgccgctgcgtgcgcgcaacgaggacccggcccgggccaacgctgaccgatacgcagtctactggaaccgtagcaaccccaggtttcaggtgagcgctgtgggtgatggcggcggctataccgtggaggtgagcatcaacgactacctggatatctactgcccacactacggggcgccgctgcccccggctgagcgcatggagcggtacatcctgtacatggtgaatggtgagggccacgcctcctgtgaccaccggcagcgaggcttcaagcgctgggaatgcaaccggcccgcagcgcccgggggacccctcaagttctcagagaagttccaactcttcacccccttttccctgggctttgagttccggcctggccacgaatactactacatctctgccacacctcccaacctcgtggaccgaccctgccagcgactcaaggtttatgtgcgtccaaccaatgagaccctgtatgaggctccagagcccatcttcaccagtaacagctcctgcagcggcctgggtggctgccacctcttcctcaccaccgtccctgtgctgtggtcccttctgggctcctagtgtcaggccggagaacaccagccccacctggaccccgtgacctttgccctctgacctgccacggccacctccgagacaaaatccttgctgcttctctttcatggtgctgtcccgccggaggaggccatccatccgtccctgggatgcaacatggggtcccaatgcctgaggagaagacccccccccaaggctgactcgctttcaccagggccaccagggccatccagtgttgtttaattacagtcggaaagacttaaggtttttcttttaatttaatttattccctgacattgctggtgacactgggaagggaacaagccacagggatgaggtgaagccatctctgtccttcctggaataccggagatccaggggcctccagctgctcctttcttctgtgtcctgttatttgggtcccagatggagcccaccgcggacttgccttgcattcctcaggccaggcaagcctgagccagaaagggcgcacggtgccagcccctctcggggactctgggggtgccatcccccactcttcttccagccactctcgggccccactcccacatcatctcagaaacccttcagccctcgcaactcgcccctccgggcccccccaccaggcacaaccatccccggggccagccgggacgttgtcggtttatttctgtaaatagaaaccagcaagtgtatactgtgatttattttaatgtattcttaaggacagaatggaaattctttaaaaaaaattttttttccgaccttcaattcaaggggtcatttattttggtggggggagtggggtggactttttaggatagaagcaacactttgcaataaactcatttttttttgttc

SEQ ID NO: 92 - DNA, 642 bp, human
atggcgcccgcgcagcgcccgctgctcccgctgctgctcctgctgttaccgctgccgccgccgcccttcgcgcgcgccgaggacgccgcccgcgccaactcggaccgctacgccgtctactggaaccgcagcaaccccaggttccacgcaggcgcgggggacgacggcgggggctacacggtggaggtgagcatcaatgactacctggacatctactgcccgcactatggggcgccgctgccgccggccgagcgcatggagcactacgtgctgtacatggtcaacggcgagggccacgcctcctgcgaccaccgccagcgcggcttcaagcgctgggagtgcaaccggcccgcggcgcccggggggccgctcaagttctcggagaagttccagctcttcacgcccttctccctgggcttcgagttccggcccggccacgagtattactacatctctgccacgcctcccaatgctgtggaccggccctgcctgcgactgaaggtgtacgtgcggccgaccaacgagaccctgtacgaggctcctgagcccatcttcaccagcaataactcgtgtagcagcccgggcggctgccgcctcttcctcagcaccatccccgtgctctggaccctcctgggttcctag

SEQ ID NO: 93 - DNA, 1718 bp, rat
  misc_feature (1)..(1): n is a, c, g, or t
ngcccgctgctgccgctgctgctgttgctgctgccgctgcgtgcgcgcaacgaggacccggcccgtgccaacgctgaccgctacgcagtctactggaaccgcagcaaccccaggtttcaggtgagcgctgtgggtgatggcggcggctacaccgtggaggtcagcatcaatgactacctggacatctattgcccgcactatggggcgccactgcccccggcagagcgcatggaacggtacatcctatacatggtgaacggcgagggccatgcctcctgtgaccaccggcagcgaggcttcaagcgctgggaatgcaaccggcccgctgcgcctgggggacccctcaaattctccgagaagttccaactcttcacccccttttccctgggctttgagttccgacctggacacgagtactactacatctctgccacaccccccaaccttgtggaccgaccctgcctgcggctgaaagtttacgtgcgtccaaccaatgagaccctgtatgaggccccagagcccatcttcaccagtaacagctcctgcagcggcctgggtggctgccacctcttcctcactacagtccctgtgctgtggtccctactgggctcctagtgtccagccccacctggaccccttgaccttcgccctctgacctgccacggccacctccgagacaaaatccttgctgcttctctttcatggtgctgtccctccggaggaggccatcgaccggtccctgggatgcaacatggggtcccagtgcctgagactgagatccaggctgagccacttttgccaggaccaccagggccgtccagtgttgtttgattacggtcagaaagacttagggtttctcttttaatttaatttattccctgatattgctggtgacattgggaaggaaacaagtcacaggggtgaggtggagccgtccctggtcttccagtcggtcctttcttctgtgtcctgttatttgggtcccaggtggaccccactgaggacttgccttgggttcctcaggccaggcaagcctgagccagaaagggtgcatggtgccagcccctcatggggactctgggggtgtcatcccccactcttctagccactgtcgagccccccctgggtccccttcaccaggcacaaccatctccagggccgtccgggaagtcgttttatttctgtaaatagaaaccagcaagtgtatactgtgatttattttaatgtattcttaaggacagaatggaaattcttttaaaaacattttccgaccttcaattcaaggggtcttttattttggtggggaggagtggggtggcctttttaggatagaagcaacacttcgcaataaactcatttttttttttttggtccgttggagccccccccccatgtgacctagtaatgtttgtaagaaaaaaaaagtaaaaaaaaaaaaaatcacaggactggaaaggaaggggagctacctaccaaaaacagaaggcaaaggactgagtgaagctggccacaccacacgtttctatggatttcggatttctacccacgtttcctcactctgttttctatatattctatataaatatatattgtggatggccgccatggcaaggggtggctggggcttttgtaggggcgggggacgggtgacccggccccctcatcgcaatcagctttgaagtctgtatttttttataataaaatggacaaactgtaaa

SEQ ID NO: 94 - DNA, 1596 bp, mouse
cacttttgtacctttctcgccgggacagagaagtgggccgggaccagccgggccagaccagactggaccccaggggcgatgcggctgctgcccctgctgcggactgtgctctgggccgcgctgctcggctcgcgcctgccggggtgctccagcctccgccacccaatctactggaactcctctaaccccaggttgctccgaggagatgccgtggtggagctgggcttcaacgattacctagacatcttctgcccacattatgaaagcccagggcccccagaaggcccggaaacctttgcattatacatggtggactggtcaggctacgaggcctgcacggcagagggggcaaatgccttccagcgctggaattgctcgatgccttttgcccctttcagccctgttcgattctcagaaaagattcagcgctacacacccttcccgctgggctttgagttcttgcctggagagacttactactacatctcggtgccgactccggagagtcctggccggtgcctgagactccaggtgtctgtctgctgcaaggagagcgggtcatcacatgagtcagctcatcctgttgggagtcctggagaaagcggtacgtccgggtggcggggaggacacgcgcccagccccctgtgtctcttgctgctgctgctgctcccaatcctccgtctcctgagagttctgtgagccaagcacaccttccaagtcaccccaaggaaccgcagcccttgtcaagagcctctgtggaaggggttcctgccaccatacaggcgatgccaaaccaggcagacaggatgaaactttgatgtgcaaagtcggaggatctgaggtgacccttgtaggtgactgccccctcaccacaggctgaagagggacctgtaaggcagctgccgacagtccgacagtccgggggcgcccaggaacatagcatagctgctttgatggtcttgtctcctccccctggaagactgggattccaggggatcaactccttgagacactgagggcccaagccaaagacctgggaacaggtgggttcctggccaagaagcaaaggagaagccatggcgcctgtgccctccaggcctcttcccaggagcaattgttgccccttcctgggggccactcgcttgtcttctgtgaagacggacttgccatgaggttgaatttcatgctggtttgtattttttataaagtgtttggaccaaaccttcaataaatcacccgttctagtggggcatggtggctcacacctgtaattccagcactgggagggtgagggtggggagagtgagcaggaggtcagatgggtatgggagaccctgtctcaaaaaaaaaaaaaaacaagaacaaagcaaaccaccaccttggagagcagtgagcaggctcagcaggtgaaagtgtgagctcaccacagagccttgaccacctgagcgaggtcaatccctggaacccacactgtgaagagagagaacacaccccaaaaagttgtccttcgaacatgctacacggcgtgtcaatggatatgccacacacatgcgcgggcacgcgtgcacacacactcaaataataaacttaggttaa

SEQ ID NO: 95 - DNA, 1276 bp, human
cttccctcttcactttgtacctttctctcctcgactgtgaagcgggccgggacctgccaggccagaccaaaccggacctcgggggcgatgcggctgctgcccctgctgcggactgtcctctgggccgcgttcctcggctcccctctgcgcgggggctccagcctccgccacgtagtctactggaactccagtaaccccaggttgcttcgaggagacgccgtggtggagctgggcctcaacgattacctagacattgtctgcccccactacgaaggcccagggccccctgagggccccgagacgtttgctttgtacatggtggactggccaggctatgagtcctgccaggcagagggcccccgggcctacaagcgctgggtgtgctccctgccctttggccatgttcaattctcagagaagattcagcgcttcacacccttctccctcggctttgagttcttacctggagagacttactactacatctcggtgcccactccagagagttctggccagtgcttgaggctccaggtgtctgtctgctgcaaggagaggaagtctgagtcagcccatcctgttgggagccctggagagagtggcacatcagggtggcgagggggggacactcccagccccctctgtctcttgctattactgctgcttctgattcttcgtcttctgcgaattctgtgagccaagcagaccttccctctcatcccaaggagccagagtcctcccaagatcccctggaggaggagggatccctgctgcctgcactgggggtgccaattcagaccgacaagatggagcattgatgggggagatcagagggtctgaggtgactcttgcaggagcctgtcccctcatcacaggctaaagaagagcagtagacagccctggacactctgaagcagaggcaagacaaacacaggcgctttgcaggctgctctgagggtctcagcccatcccccaggaggactgggatttggtatgatcaaatcctcaagccagctgggggcccaggctgaagacctggggacaggtcgattgctggaccagggcaaagaagaagccctgccatctgtgccctgtgggccttttccctggggcagcaccttgccctccccaggggatcactcacttgtcttctatgaagacggactcttcatgaggttgaatttcatgccagtttgtatttttataagtatctagaccaaaccttcaataaaccactcatctttttgttgccctccccaaaaaaaaaaaaaaaaaaaaa

SEQ ID NO: 96 - DNA, 1322 bp, rat
tccacttttgtacctttctcgccgggacagagaagtgggccgggaccagccgggccagaccagactggaccccaggggcgatgcggctgttgcccctgctgcggactgtgctctgggccgcgctgctcggctcgcgcctgcgggggtgctccagcctccgccactctatctactggaactccactaaccccaggttgcttcgaggagatgccgtggtggagctgggcctcaacgattacctagacatcttctgcccacattatgagagcccagggcccccagagggcccggaaacgtttgcattatacatagtggactggtcaggctacgaggcctgcaaggcagagggggcaaatgccttccagcgctggaattgcacgctaccttttgcgccttttgtccctgttcgattctccgaaaagattcagcgcttcacaccgttcccgctgggcttcgagttcttgcctggagagacttactactacatctcggtgccaactccggagagtcctggccagtgcctgagactccaggtgtctgtctgctgcaaggaggacagatccgagtcagctcatcctgtcgggagccctggagaaagtggcacatctgggtggcggggaggacacgcccccagccctctgtctctcctgctgttgctgctgctcccaatactccgtcttctgcgagttctgtgagccaagtacaccttcccagtcaccccaaggagccagagcccttcccaggatcctctgttgaaggggttcctgccaccgtacaggcgatgccaagccaggcagacatgatgaagctttgatgtgcaaagtcggaggatctgaggtgacccttgtaggtgactgctccctcactacaggctgaagaggaactgcaaggaagctgcagacagtcgggcacccagaagcatagctgctttgatggtcttgtctcctccccctggaagactgggatttcaggggatcaaatccttgagacactgggggccaaagccaaagacctgggaaccggtgggttcctggccaagagcagagaagccacggtctctgtggcctccaggcctcttcccaggagcaattgttgccccttccagggagccactctcttgtcttctgtgaagacggacttgccatgaggttgaatttcatgctggtttgtattttttataaagtgtttggaccaaaccttcaataaatcacccgttctagtgggggcatggtggctcacacctgtaatcccagcactgggggtggggggtgggggtggggactgtgagcgggaagtcagtcttgtatgggaggccctgtctc

SEQ ID NO: 97 - DNA, 1574 bp, human
gcttctctccatcttgtgattcctttttcctcctgaaccctccagtgggggtgcgagtttgtctttatcaccccccatcccaccgccttcttttcttctcgctctcctacccctccccagcttggtgggcgcctctttcctttctcgccccctttcatttttatttattcatatttatttggcgcccgctctctctctgtccctttgcctgcctccctccctccggatccccgctctctccccggagtggcgcgtcgggggctccgccgctggccaggcgtgatgttgcacgtggagatgttgacgctggtgtttctggtgctctggatgtgtgtgttcagccaggacccgggctccaaggccgtcgccgaccgctacgctgtctactggaacagcagcaaccccagattccagaggggtgactaccatattgatgtctgtatcaatgactacctggatgttttctgccctcactatgaggactccgtcccagaagataagactgagcgctatgtcctctacatggtgaactttgatggctacagtgcctgcgaccacacttccaaagggttcaagagatgggaatgtaaccggcctcactctccaaatggaccgctgaagttctctgaaaaattccagctcttcactcccttttctctaggatttgaattcaggccaggccgagaatatttctacatctcctctgcaatcccagataatggaagaaggtcctgtctaaagctcaaagtctttgtgagaccaacaaatagctgtatgaaaactataggtgttcatgatcgtgttttcgatgttaacgacaaagtagaaaattcattagaaccagcagatgacaccgtacatgagtcagccgagccatcccgcggcgagaacgcggcacaaacaccaaggatacccagccgccttttggcaatcctactgttcctcctggcgatgcttttgacattatagcacagtctcctcccatcacttgtcacagaaaacatcagggtcttggaacaccagagatccacctaactgctcatcctaagaagggacttgttattgggttttggcagatgtcagatttttgttttctttctttcagcctgaattctaagcaacaacttcaggttgggggcctaaacttgttcctgcctccctcaccccaccccgccccacccccagccctggcccttggcttctctcacccctcccaaattaaatggactccagatgaaaatgccaaattgtcatagtgacaccagtggttcgtcagctcctgtgcattctcctctaagaactcacctccgttagcgcactgtgtcagcgggctatggacaaggaagaatagtggcagatgcagccagcgctggctagggctgggagggttttgctctcctatgcaatatttatgccttctcattcagaactgtaagatgatcgcgcagggcatcatgtcaccatgtcaggtccggaggggaggtattaagaatagatacgatattacaccatttcctataggagtatgtaaatgaacaggcttctaaaaggttgagacactggttttttttttt

SEQ ID NO: 98 - DNA, 3473 bp, mouse
cctccttcttctctctctcctcttcctcttcctcccgcgctcgccgcgcgcctctcgccccttcatcgtatttattcctatttatttggcgtccgctctcttcgtctgcccctctccctccctccccctggatccccgatctctccccggagtggcgcgtcgggggctccgccgctggctaggcgtgatgttgcacgtggagatgttgacgctgctctttctggtgctctggatgtgtgtgttcagccaggacccgggctccaaagtcgtcgccgaccgctacgccgtctactggaacagcagcaaccccagattccagaggggtgactaccacattgatgtctgtatcaatgactacctggatgttttctgccctcactatgaggactctgtcccagaagacaagactgagcgctacgtcctgtacatggtgaattttgatgggtacagtgcctgcgaccacacgtccaaagggttcaagagatgggaatgtaaccggcctcactccccaaacggaccgctgaagttctcggaaaaattccagctcttcactcccttttctttaggatttgaattcaggccaggccgagagtatttctacatctcctctgcaatcccagacaacggaagaaggtcctgtctaaagctcaaagtctttgtgagaccaacaaatagctgtatgaaaactataggtgttcatgatcgtgttttcgatgttaacgacaaagtagaaaattcattagaaccagcagatgacaccgtacatgagtcagccgagccatcccgcggtgagaacgcggcgcagacaccaaggatacccagccgccttttggcaatcctactgttcctcctggcgatgcttttgacattatagcacagtctcctcccgtcgcctgtcacagaaaatgtcagggtcttggaacaccagagatccacctaactgctcatcccaagaagggacttgttattggtttttggcagatgtcagatttttgttttctttccttcagcctgatttctaagcaacaacttggggttgttgggtgggtggggggggggtaaaccagttgctgcctccttcaccccaccctaccctaagcccttgcccttgactcctctcatccccttcccaatcaaacggagtccagataaaaatgccagattgtcagagtgacagcagcaggtcttggcctcctgtgcgttttctagagctcacctccttaggttcagggtatccaccatatgcacacaagaaagaatggcggcagatgctgcctgcaatgtccaggcctgagaggggtgccctctcctatacaatacttatgccttcacggtcaggacagtaaggtgattgtgtggagcttggtgttggcctgtcgagtccagagggggcggagttaagaataggcctaatactatcccacatcctctaggagtgtggaagtgagcaggctttgcaaaggttcagatactagtttttatttcatcaaatgggactgtcttaaagcattttttttttttttttttttttttgccagcaaaacttgggctgtgttgaagaagccttttctcccaggaggaaggttggatgatgcagggatgctaataagaggaagtgtggatattgagaaaatgatctgttgctggaggtgtgagtgcctctaactttttaggaccgggcagtgcacacctgagggtttcttttcttttctttttttttttaaatctttgaatacagttcaccatggtgctacaactttttttttctttttaggacttcaaagaggcatttttatgaataaagtgaccttccccaaggctgccaagccagggttgatgagtagagagtggaatagctttggctactcctctggggacaatatgtacaaggaaagagagtctgaccagaggagatgcaatttggctttgctggagctccagtgtgctgtggcctttccccaattcccaccccgatacccacgttctgctccttgctccgtgaccacaggggactcagacacagacccctatcaccaggagagtcagtcagcactacttgggagggctaaagggaaatttggaatacaaattccaaattttggaataagaaattcaagtgttgatgttctatcctttccctttctgacacagcctaaagcgtagggggaaacgcgtgtttatctgtgggagataaacaagatggagtcccaaagactttgacaaaatatttttttaaaaatccactagaatagaaaatacattatttagatatactttatgctgagagtgagtatatatgcttgtcctatttaaacttgtgagaaaaagtggtatcccttggtacatttagaaacacagggggttatcttgtttcatagtggggtttggggcagaagaatgaacatgggatgaccctgttgaaagaaacttagcatggccgaggggttggttccagctgattgccaggaaacacaagcagtgggggtctccttgtggggtgtcgggagctttaaaccccaaagccaagcgagacagggaatagtgtcagaccaatggaaaagtgatctagcctatttttgctattgcacgacatcaatagaaaccatgcctttgtaaacaagcaagtcagtaaatgcaatgatcatgtaatgtggaaaattgaaagcattccagtttaaaaaatatggaattttttatatattcgtttttaagatgtatatgtaaaaaaaagagttcacattatagatggacttcatggatcggaaattgcttagaatttcgagtggtttcaaattagaaaaatatgtgagtggaaggcagctgtgaacgaactgcaccctagagagttgtacgcacgttggaatgtaagctgggcttacttacctggtccctttggagtggaggcaactggagtctgctctcacctgaaccatgtgaccggagtcgccagcctcaaagatatagttagtcctctcccctcttctcccaacatctgagacttctctggagtagcagagtctcatcacagaaggcacccaacatttccactgaaacagaacttcaaagcattggatttctttgcctttatttatgcgctcgacactctcagtgatatccagatgtattctttttattaatagttacaggtttgtgggttagtgggatttcagtaaagggacaaaaaaaaaaatcccttctaagatggatcgatagaaccaagataatactgcatgtactacagtcaaggacaccaagtgatcctatggtgattccagttagtcctaacgacattagtggttctaatgtcattgtagaaatggtgagtcctgtgattctagcatttgtctctaaccaatgatgaaacaattcctcatggccctctctgccattgtctttcatttcccactgtgcaattagacccttttacttcactgccatgccaccaattattaagtttaaaaaaaaaaaaaaaa

SEQ ID NO: 99 - DNA, 768 bp, rat
gagaggcgcgtcgggggctccgccgctggctaggcgtgatgttgcacgtggagatgttgacgctgctctttctggtgctctggatgtgtgtgttcagccaggacccgggctccaaagtcgtcgccgaccgctacgccgtctactggaacagcagcaaccccagattccagaggggtgactaccacatcgatgtctgtatcaatgactacctggatgttttctgccctcactatgaggactctgtaccagaggataagactgagcgctatgtcctgtacatggtgaattttgatggctacagtgcctgcgaccacacatccaaagggttcaagagatgggaatgtaaccggcctcactctccaaacggaccgctgaagttctcggagaaattccagctcttcactcccttttctttaggatttgaattcaggccaggccgagagtatttctacatctcctctgcaatcccagacaatggaagaagatcctgcctaaagctcaaagtctttgtgaggccaacaaacagctgtatgaaaactataggtgttcgtgatcgtgttttcgatgttaacgacaaagtagaaaattcattagaaccagcagatgacaccgtacatgagtcagccgagccatcccgcggagagaacgcggcacaaacaccaaggatacccagccgccttttggcaatcctactgttcctcctggcgatgcttttgacattatagcacagtctcctcccgtcacctgtcacagaaaacatcagggtct

SEQ ID NO: 100 - DNA, 4342 bp, mouse
cccacgcgtccgcgcgcgctgagggacgcgcagggtgagcgcacctggcctcggcgaccgcgggagcggcgcggcgtgtccgccccggaggattgggggtcgctgcccgcggccggtcccaacgcgtcccggagtgcgcagaactgggagcggcttgggcatggccatggcccggtccaggagggactctgtgtggaagtactgttggggacttttgatggttttgtgcagaactgcgatctccagatcgatagttttagagcctatctactggaattcctcgaactccaaatttctacccggacaaggcctggtactatacccacagataggagacaaattggatattatttgccccaaagtggactctaaaactgttggccagtatgaatattataaagtttatatggttgataaagaccaagcagacagatgcacaattaagaaggagaataccccgctgctcaactgtgccagaccagaccaagatgtgaaattcaccatcaagtttcaagaattcagccctaacctctggggtctagaatttcagaagaacaaagattactacattatatctacatcaaatgggtctttggagggcctggataaccaggagggaggggtgtgccagacaagagccatgaagatcctcatgaaagttggacaagatgcaagttctgctggatcagccaggaatcacggtccaacaagacgtccagagctagaagctggtacaaatgggagaagttcaacaacaagtccctttgtgaagccaaatccaggttctagcaccgatggcaacagcgcggggcattccgggaacaatctcctgggttccgaagtggccttattcgcagggatcgcatcaggatgcatcatcttcatcgtcatcatcatcactttggtggtgctgctgctcaagtaccgcaggagacaccgcaaacactctccacagcacacgaccacgctgtctctcagcacactggccacgcccaagcgaggtggcaacaacaatggctcggagcccagtgacgttatcataccactaaggactgcagacagcgtcttctgcccgcactacgagaaggtcagcggggactatgggcacccggtgtacatcgtgcaggagatgcccccacagagtcctgccaacatttactacaaggtctgaggcctgagacctgcgcctcccaagggaactcgcaccttgttcttgggcacgcagggactgcctgagcctggctgtgggggcaggatgcctcctggaagagcctggatctggacagttttgtagtctgtagcttttccgaccctggggaccacagaccctccccggaagctggaagactgctaggagatccccacttggactgccgcggccccacgcggacctccaagccatgcacccagccactcaggcctctgcagagcccggggaggacacggtaggctatggatggcgcagcagcatcttaggagaaggttgcgcaccaggccggcccctgcctccacgtttcctgccgtgcacactggacttatcacttggacctcgggttcagtaaggttttcaaagatctctagtgtttagtcctcactcactcactcactcactcactccttctcttgccagggctctgcagcaaactccctagacccctcactccacgtactgcatcattacgggacactcaccacagagtcccagctccaccctttacaccaagatcaaattagatgggtattaggtacagaagaaccctgcttgcctggaggccgggtcagccgggaagcgcagatgtgtggaggagtgaggaggtgctggctgccacggcaggtcaaggctgcttgctgcccctggagcatagtagggatgcaggaaggaaatagataatgctttggtttttctgagaggacagagacaggtgggaggtgactgactggtgagtggtggggagcctttcactaccacacagctatgcagcagggaatcaaaagtccctctcctgcggggaacaaaggggccattgttgtgaaaggaccagctagagcacagagggagagggcaggcctccggtgaagtgctggggcagaactgcagaggtactggaaataaaaagcgcagcgcagagctgtgggagagtccgtctgctttgggagatgttttaagcagactcagctgctatattaccacgtttttattaaaaacacagggaaagcatttaggagaagagcagagagccaaatctgacctagaagttgaaaagccaaaggtcaaacaggctgtaagtccatcaccactgaggttattggagaattctcattaggaaaggcaggtcagattccccaggccccataagtgccccttccccctccctgattgagccttacacgttggtttttggtttatggccgtgctgtccgggctccaaggcagtacccgggctccatgtcaaagcaaagcacacatggcccacctcttagagtccttgagatggaagtaagttatgccgcggaaggaaaggcgaagataggacatatttataataggtgtatagaacacaagggatataaaatgaaagatttttactaatatatattttaagattacacacaatacacaccagaagacgtggagttcggtggtggtggtggtcgtggtggtggtgattaaagtgaccccagcgcttagtgctttaaaaagtgaaagattgggtagctactccccgaaacgtaccaatagcaagaaaagtatccataatgagagcaaatggcaaaaataacacggtcctgcgggaatctcgcagaaccgtagactaggaatgccagccccccaaattgatgtgaccctgccccgggttagacaatgataaaatgcgctggcctttattttctgtgttgggttttcccttgccttatgggctgaagtgttctctagaatttagcaggtcacactgaggggattccagtttaactgtgggtccctcctcctctcctaccccatccctgcccttccagagaataacaggaagccttcctttttttttttttttaagtgctatgcaaaagagacatctttaacagagtcctgttactatggtaacattttgctttctgaattgggaggaaataaaaattgtaatgacagcatttgaaggttctcagacctccagtgagtacctgcaaaaatgagttgtcacagagattattccctacttctcaaacctgaaaatgatgttggttcgatgtgtgtgtgtgtgtatgagtgggtgtgtggtacatgtgtgtacatatatgtataatatatatctccagtatatattatatatatctatatcatatttctgtggagggttgccatggcaatcaactgcagtacatatgtagttctttccatcaccctaacctctcctgcgcattcacacaagagtttcttgtaagccatcaaaagttaattctagggggagagggatgaggcggggagacatgggaaaccgtctgattttaatgaaatcaaatgtctgtgtcatcggttggctacgttttggttctatgctaaactgtgaagaatcggatgaattgatgaagagttgagttacctgcaacccattgagaagtgtcctgtgcgtctgttttgtgtctggtgcagaaaatgacaatctaccaactgtccccttatttggagttggttcagctttggaaagttactgtaaatgccttgcttgtattatcatccctagtcacctgacttcggagcttgcaccatcgtgttttaagtgaagacgctgtaaataggttcagatcttaccgtctatggattcgggtgttacagtagccttattcacctttttaataaaaatacacatgaaaacgagacagtaatggcttttcttacccagattgtgtacatagagcaatgttggttttttataaagtctaagcaagatgttttgtataaaatctgaattttgcaatgtatttagctacagcttttaacggcagtgtcatcccctttgcactgtaatgaggaaaaaaaaaaggtataaaaggttgccaaattgctgcatatttgtgccgtaattatgtaccatgaatatttatttaatttcgttgtccaatttgtaagtaacacagtattatgcttgagttataaatattttttctttgttttattttaatagcctgtcataggtttttttttaatctgctttagttccacatgacagttaagccccagaaatgagatccgagcagccacattccacgtctgtttcaaaatgaatttgttcttaaaaaaaataaaatatttttttcctatggaaaaaaaaaaaaaaagggcggccgc

SEQ ID NO: 101 - DNA, 4335 bp, human
gcgcggagctgggagtggcttcgccatggctgtgagaagggactccgtgtggaagtactgctggggtgttttgatggttttatgcagaactgcgatttccaaatcgatagttttagagcctatctattggaattcctcgaactccaaatttctacctggacaaggactggtactatacccacagataggagacaaattggatattatttgccccaaagtggactctaaaactgttggccagtatgaatattataaagtttatatggttgataaagaccaagcagacagatgcactattaagaaggaaaatacccctctcctcaactgtgccaaaccagaccaagatatcaaattcaccatcaagtttcaagaattcagccctaacctctggggtctagaatttcagaagaacaaagattattacattatatctacatcaaatgggtctttggagggcctggataaccaggagggaggggtgtgccagacaagagccatgaagatcctcatgaaagttggacaagatgcaagttctgctggatcaaccaggaataaagatccaacaagacgtccagaactagaagctggtacaaatggaagaagttcgacaacaagtccctttgtaaaaccaaatccaggttctagcacagacggcaacagcgccggacattcggggaacaacatcctcggttccgaagtggccttatttgcagggattgcttcaggatgcatcatcttcatcgtcatcatcatcacgctggtggtcctcttgctgaagtaccggaggagacacaggaagcactcgccgcagcacacgaccacgctgtcgctcagcacactggccacacccaagcgcagcggcaacaacaacggctcagagcccagtgacattatcatcccgctaaggactgcggacagcgtcttctgccctcactacgagaaggtcagcggggactacgggcacccggtgtacatcgtccaggagatgcccccgcagagcccggcgaacatttactacaaggtctgagagggaccctggtggtacctgtgctttcccagaggacacctaatgtcccgatgcctcccttgagggtttgagagcccgcgtgctggagaattgactgaagcacagcaccgggggagagggacactcctcctcggaagagcccgtcgcgctggacagcttacctagtcttgtagcattcggccttggtgaacacacacgctccctggaagctggaagactgtgcagaagacgcccattcggactgctgtgccgcgtcccacgtctcctcctcgaagccatgtgctgcggtcactcaggcctctgcagaagccaagggaagacagtggtttgtggacgagagggctgtgagcatcctggcaggtgccccaggatgccacgcctggaagggccggcttctgcctggggtgcatttcccccgcagtgcataccggacttgtcacacggacctcgggctagttaaggtgtgcaaagatctctagagtttagtccttactgtctcactcgttctgttacccagggctctgcagcacctcacctgagacctccactccacatctgcatcactcatggaacactcatgtctggagtcccctcctccagccgctggcaacaacagcttcagtccatgggtaatccgttcatagaaattgtgtttgctaacaaggtgccctttagccagatgctaggctgtctgcgaagaaggctaggagttcatagaagggagtggggctggggaaagggctggctgcaattgcagctcactgctgctgcctctgaaacagaaagttggaaaggaaaaaagaaaaaagcaattaggtagcacagcactttggttttgctgagatcgaagaggccagtaggagacacgacagcacacacagtggattccagtgcatggggaggcactcgctgttatcaaatagcgatgtgcaggaagaaaagcccctcttcattccggggaacaaagacgggtattgttgggaaaggaacaggcttggagggaagggagaaagtaggccgctgatgatatattcgggcaggactgttgtggtactggcaataagatacacagctccgagctgtaggagagtcggtctgctttggatgattttttaagcagactcagctgctatacttatcacattttattaaacacagggaaagcatttaggagaatagcagagagccaaatctgacctaaaagttgaaaagccaaaggtcaaacaggctgtaattccatcatcatcgttgttattaaagaatccttatctataaaaggtaggtcagatccccctccccccaggttcctccttcccctcccgattgagccttacgacactttggtttatgcggtgctgtccgggtgccagggctgcagggtcggtactgatggaggctgcagcgcccggtgctctgtgtcaaggtgaagcacatacggcagacctcttagagtccttaagacggaagtaaattatgatgtccagggggagaaggaagataggacgtatttataataggtatatagaacacaagggatataaaatgaaagatttttactaatatatattttaaggttgcacacagtacacaccagaagatgtgaaattcatttgtggcaattaagtggtcccaatgctcagcgcttaaaaaaacaaattggacagctacttctgggaaaaacaacatcattccaaaaagaacaataatgagagcaaatgcaaaaataaccaagtcctccgaaggcatctcacggaaccgtagactaggaagtacgagccccacagagcaggaagccgatgtgactgcatcatatatttaacaatgacaagatgttccggcgtttatttctgcgttgggttttcccttgccttatgggctgaagtgttctctagaatccagcaggtcacactgggggcttcaggtgacgatttagctgtggctccctcctcctgtcctcccccgcaccccctcccttctgggaaacaagaagagtaaacaggaaacctactttttatgtgctatgcaaaatagacatctttaacatagtcctgttactatggtaacactttgctttctgaattggaagggaaaaaaaatgtagcgacagcattttaaggttctcagacctccagtgagtacctgcaaaaatgagttgtcacagaaattatgatcctctatttcctgaacctggaaatgatgttggtccaaagtgcgtgtgtgtatgtgtgagtgggtgcgtggtatacatgtgtacatatatgtataatatatatctacaatatatattatatatatctatatcatatttctgtggagggttgccatggtaaccagccacagtacatatgtaattctttccatcaccccaacctctcctttctgtgcattcatgcaagagtttcttgtaagccatcagaagttacttttaggatgggggagaggggcgagaaggggaaaaatgggaaatagtctgattttaatgaaatcaaatgtatgtatcatcagttggctacgttttggttctatgctaaactgtgaaaaatcagatgaattgataaaagagttccctgcaaccaattgaaaagtgttctgtgcgtctgttttgtgtctggtgcagaatatgacaatctaccaactgtccctttgtttgaagttggtttagctttggaaagttactgtaaatgccttgcttgtatgatcgtccctggtcacccgactttggaatttgcaccatcatgtttcagtgaagatgctgtaaataggttcagattttactgtctatggatttggggtgttacagtagccttattcacctttttaataaaaatacacatgaaaacaagaaagaaatggcttttcttacccagattgtgtacatagagcaatgttggttttttataaagtctaagcaagatgttttgtataaaatctgaattttgcaatgtatttagctacagcttgtttaacggcagtgtcattcccctttgcactgtaatgaggaaaaaatggtataaaaggttgccaaattgctgcatatttgtgccgtaattatgtaccatgaatatttatttaaaatttcgttgtccaatttgtaagtaacacagtattatgcctgagttataaatatttttttctttctttgttttattttaatagcctgtcataggttttaaatctgctttagtttcacattgcagttagccccagaaaatgaaatccgtgaagtcacattccacatctgtttcaaactgaatttgttcttaaaaaaataaaatatttttttcctatggaaaaaaaaaaaaaaaaaa

SEQ ID NO: 102 - DNA, 2040 bp, rat
cgcgcgtcagacgcctgcgggggtcccagtgctctcctgactgcttagcggcggcgagttgcgaggattcaggaggcgccctttctctctgcgctccaggacatggaaccgcgccgacgaggcgctcgcttgcccgggccgctgcccgctgtcctggatctatagtcaggcggcccctctcggggagcagcacccgccacctcacaccgactggtctctccgctgcgggcctttgtcccggcccagtgccctcgccgcgcccgccctccgcggctggcccggcaccctggagccgcacgggagccggctgtcccagctgcgtccggcgcggcgccccggagccccgagtccgccgagccgccgcgccccgcgcgttcgaccccaccccgcgcgctgagggcagcgcagggtgagcgcacctggcctcggcgaccgcgggagcggcgcgtccgccggggaggattggtggtcgcgaccggcggccggtcccatcgcgccccggagtacgcagaactgggagcggtttggccatggccatggcccggtccaggagggactctgtgtggaagtactgttggggacttttgatggttttgtgcagaactgcgatctccagatcgatagttttagagcctatctactggaattcctcgaactccaaatttctacccggacaaggcctggtactatacccacagataggagacaaattggatattatttgccccaaagtggactctaaaactgttggccagtatgaatattataaagtttatatggttgataaagagcaagccgacagatgcactattaagaaggaaaataccccactgctcaactgtgccagaccagaccaagatgtgaaattcaccatcaagttccaagaattcagccctaacctctggggtctagagtttcagaagaacaaagattactacattatatctacatcaaatgggtctttggagggcctggataaccaggagggaggggtgtgccagacaagagccatgaagatcctcatgaaagttggacaagatgcaagttctgctggatcaaccaggaataatgatccaacaagacgtccagagctagaagctggtacgaatgggagaagttcaacaacaagtccctttgtgaagccaaatccaggtacgccacagggcaaacccaggactctggtaaccggctcttcttgctcctgtgcaggttctagcaccgatggcaacagcgcggggcattccgggaacaatctcctgggttccgaagtggccttattcgcagggattgcatcaggatgcatcatcttcatcgtcatcatcatcactttggtggtgctgctgctcaagtaccgcaggagacaccgcaaacactctccacagcacacgaccacgctgtctctcagcacactggccacgcccaagcgaggtggcaacaacaatggctcggagcccagtgacgttatcataccgctaaggactgcagacagtgtcttctgcccacactacgagaaggtcagcggggactatgggcacccggtgtacatcgtgcaggagatgcccccacagagtcctgccaacatttactacaaggtctgaggcctgagacctgcgcctcccaagggaactcgcaccttgttcttgggcacgcagggactgcctgagcctggctgttgggggcaggatgcctcccggaagagcccggatctggacagttttgtagtctgtagcttttcgaccctggggaccacagaccctccccggaagctggaagactgctaggagatccccacttggactgccgcgttcccacgcggacctccaagccatgcacccagccactcaggcctctgcagagcccggggggtgggggggacgacacggcaggctatggatagtgcagccacatcttaggagaaggttgcgcaccaggccggcctctgcctccacgtttcctgccgtgcacactggacttatcactcggacctcgggttcagtatggttttcaaagatctctagtgtttagtcctcactcactcct

SEQ ID NO: 103 - DNA, 3236 bp, human
ggtttcctcccttagcccgctgccctcaatcccagcgaggctggggctccggctcggcgcccccttcctcgctccctggtccggcgccccatgccgcccccgcccggtccccggctcccccagtcccccacttaggcgggctcacagatcccggggtgctggcgcgtgggccgggggcgcgtagggcgcctgcagacggcccctggaagggctctggtggggctgagcgctctgccgcgggggcgcgggcacagcaggaagcaggtccgcgtgggcgctgggggcatcagctaccggggtggtccgggctgaagagccaggcagccaaggcagccaccccggggggtgggcgactttgggggagttggtgccccgccccccaggccttggcggggtcatggggcccccccattctgggccggggggcgtgcgagtcggggccctgctgctgctgggggttttggggctggtgtctgggctcagcctggagcctgtctactggaactcggcgaataagaggttccaggcagagggtggttatgtgctgtaccctcagatcggggaccggctagacctgctctgcccccgggcccggcctcctggccctcactcctctcctaattatgagttctacaagctgtacctggtagggggtgctcagggccggcgctgtgaggcaccccctgccccaaacctccttctcacttgtgatcgcccagacctggatctccgcttcaccatcaagttccaggagtatagccctaatctctggggccacgagttccgctcgcaccacgattactacatcattgccacatcggatgggacccgggagggcctggagagcctgcagggaggtgtgtgcctaaccagaggcatgaaggtgcttctccgagtgggacaaagtccccgaggaggggctgtcccccgaaaacctgtgtctgaaatgcccatggaaagagaccgaggggcagcccacagcctggagcctgggaaggagaacctgccaggtgaccccaccagcaatgcaacctcccggggtgctgaaggccccctgccccctcccagcatgcctgcagtggctggggcagcaggggggctggcgctgctcttgctgggcgtggcaggggctgggggtgccatgtgttggcggagacggcgggccaagccttcggagagtcgccaccctggtcctggctccttcgggaggggagggtctctgggcctggggggtggaggtgggatgggacctcgggaggctgagcctggggagctagggatagctctgcggggtggcggggctgcagatccccccttctgcccccactatgagaaggtgagtggtgactatgggcatcctgtgtatatcgtgcaggatgggcccccccagagccctccaaacatctactacaaggtatgagggctcctctcacgtggctatcctgaatccagcccttcttggggtgctcctccagtttaattcctggtttgagggacacctctaacatctcggccccctgtgcccccccagccccttcactcctcccggctgctgtcctcgtctccacttttaggattccttaggattcccactgccccacttcctgccctcccgtttggccatgggtgcccccctctgtctcagtgtccctggatcctttttccttggggaggggcacaggctcagcctcctctctgaccatgacccaggcatccttgtccccctcacccacccagagctaggggcgggaacagcccaccttttggttggcaccgccttctttctgcctctcactggttttctcttctctatctcttattctttccctctcttccgtctctaggtctgttcttcttccctagcatcctcctccccacatctcctttcaccctcttggcttcttatcctgtgcctctcccatctcctgggtgggggcatcaaagcatttctccccttagctttcagccccccttctgacctctcataccaaccactcccctcagtctgccaaaaatgggggccttatggggaaggctctgacactccaccccagctcaggccatgggcagcagggctccattctctggcctggcccaggcctctacatacttactccagccatttggggtggttgggtcatgacagctaccatgagaagaagtgtcccgttttgtccagtggccaatagcaagatatgaaccggtcgggacatgtatggacttggtctgatgctgaatgggccacttgggaccggaagtgacttgctccagacaagaggtgaccaggcccggacagaaatggcctgggaagtagcagaagcagtgcagcaggaactggaagtgccttcatccaggacaggaagtagcacttctgaaacaggaagtggtctggctggaactccaagtggcttagtctgggggatcaggaggtgggaggtggatggttcttattctgtggagaagaagggcgggaagaacttcctttcaggaggaagctggaacttactgactgtaagaggttagaggtggaccgagaaggacttttcccagtcttcagtggcacttcccaagatctcccttcccttgtgctctgtgctgattttaggacagctaagatgactgccatgtgctgtggcaggcctaatttgtcttgttctttcctttccatatcccagtataatctctgttaatcaacaggactaccccaagaacccatgtgctctcccgagtaacccagatggctgtcttgttcattccatcctacatttctgactcctttcagactcaacacagttcccttcttagtgaccaaaatggtggcctactggctggtctagctgacagtggtacttagcaaaggccactgtttccatagtgaccagctgatacctcttcctgccctctagtgtgcaattgggtgttgcctcagtttcctcccagctcagttttattagatcaaagctgttgttgggcaccaggttggccacctcaatcaccagccaagatggttgctttgtccaccagaggtcaagttcacctctctggtgctgtagttcccagctccttcctgatttttctaatcgctccttctggggaacaggaagttgatattgccatggtggcggggtatgccgtcacctcagtagttttactgtaaaagggaaatttgaacaacaaaaaccaaaaaaaataaaaataaaaaacttcaaaagttgacaaaaaaaaaaaaaaaaaaa

SEQ ID NO: 104 - DNA, 3126 bp, mouse
gaatcccggcgaggctggggctccagctcggtgtctccttcttcgctcccttgcccggcgcctcatgttgcccccgcccggccctcggctccccatgtcccccacgtagcggggcgcacaaatcccgaggtgcggcgcgtgggccgggggcgcgtaaggcgcctgcagacggcccctgcaagggttcttgtggggctgagcgctctggagccggggagcaagcatcgcagaaaagagggtccttgtgggagctgggggtgactagccacccaccagggtgactggggttccacagcgtggtagccacccctgggcggtgagagactttgggggagttggtgccccgcccccaggcccttggtagggtcatgggggccccccattttgggccagggggtgtgcaagtcggggccctgctgctgttaggttttgcggggctggtatctggactcagcctggagcctgtctactggaactcggcgaataagaggttccaggcagagggcggttacgtgctttatcctcagatcggggaccggctagatctactttgtccccgggctcggcctcctggcccccactcctctcctagttatgagttctacaaactgtacctggtagagggtgcccagggtcggcgttgtgaggcaccccctgccccaaaccttcttctcacatgtgaccggccagacctggacctccgcttcaccatcaagttccaggaatacagccctaacctctggggccacgagttccgatcccaccacgattactacataattgccacatcagacgggacccgggaaggccttgagagcttgcaaggaggcgtgtgcctaaccagaggcatgaaggtgcttctgcgagtgggacaaagtccccgaggaggagctgtaccccgaaaacctgtgtctgaaatgcccatggagagagacagaggggcagctcacagcgcggaacctgggagggacaccataccaggtgaccccagcagcaatgcaacctcccggggtgctgaaggccccctgccccctcccagcatgcccgcagtggctggggcagcaggggggatggcgctgctcttgctgggcgtggcaggggctgggggtgccatgtgttggcggagacggcgggccaagccttcggagagtcgccaccctggtcctggctcctttgggaggggagggtctctgggcctgggtggtggaggagggatggggcctcgggaagctgagcctggggagctaggaatagccctgcggggtggtgggactgcagacccccccttctgccctcactacgagaaggtgagcggtgactatgggcaccctgtgtacattgtgcaggatgggcccccccagagccctccgaacatctattacaaggtatgagggctcctcccacctggctctcctcaatctagccgtccatggggtgctcctccagtgtaattcatggtatgagggacacctgcgccatgactttggccccctttgccctaccagctctttggctcctcctggctatagccctcatctccaattttaggatcccttaagacttgactacaccttttcctgacctccccgactgaccctcatttgactgtgggcactcctctgtttctgcctcttaggggaggggggtcacaggctcagcctcccttaatcactacccaggtgtcctttctccctcacccacccagagtgggggtggggacagtctgtcttttggttggcacctctttctgcctctcaccatttttctcttctctctatttcttattctctctctctcctgtgtctaggtctgttctcttcctcctccctagcctcctccttacatctccttttaccctctcggcttcttgtccttcctgtgcctctcacgtgtctcctgggttggggcatcaaagcatctctcctctttgctcttggccctttccaacctttcataccaactgctcccctctgtccgccaaaaacgggggcttgcggggggtgggggggagattctggaactctacccccccagctccaggcatgggcacagggcctctttccctgcctttctgtgtacttactccagccatttggggtggttattgggccacaactactaccatgagaagaagtgtcctgttgtggccagtggctgataggaagacatgaagcagtgtggacatgatggactgtgtctgatgccgaatgggcatcagataggaagtgactcgttccagacaagaagtgaccaggcctggacagaaatggcctgggaagtgtccgcagcaggaactggaagtgccttcatccagaacaggaagtcgcacttctgaaataggaagtggtctggctggaattccaagtggcttagtctggggaggtggcctgggtgggggtgggggcatgggaagtggatggttcttaccctgtggagaaaggggcaggaggaactccctgctttaggaggaagctggaacttaccactgtgagaggacagatgtggactgagagttttcttagtgttcagtggcacttcccaaggaccccttcccttgtgctctgtgcagtttttaggacagctaagatgactgccacttgctgtggcaggcccaatttgtcttgttctccccttactgtaccccagtataatctctgttgatcaacagaactaccccaagaacccacatgttctccccacctaaccagacggctgtctggctgatgccttcctcccttcaagcccaacacagcgcccttgtcagtgaagaggtggtccatggactggtctagctgatggcagttattagcactggttgctgtttccatagtgacaagcctatacctcttcccgctctttagtgtgcagtgggctgctgcctcggtgttctcccgcctcagttttattagatcaaagctgcccttggccatcatgttggccacctcaatcaccagccaaaatggttgctttgtccaccagaggtcaagccatctctctggcgctgtagttcccagctccttctagggaacaggaagttgatattgccattggggaggtggcggggtatggccgtcacctcgatagttttattgtaaaagggaaatttgaacaacaacaaaaaaactg

SEQ ID NO: 105 - DNA, 3287 bp, rat
gtggggggcgtgggccgcgggatgcgacgcccgctccgactgagctccagctccggtttttccctccaccatgctctccccctccccgcctctcctttaactcccccctcctgggctcgggactggtttcctcccttagcccgctgccctcaatcccggcgaggctggggctccagctcggtgtctccttcttcgctgccttgcccggcgccccatgtcgcccccgcccggccctctgctccccatgtcccccacgtagcccggcgcacaaatcccgaggtgcggcgcgtgggccgggggtgcatagggcgcctgcagacggcccctgcaagggttctagtggggctgagcgctctggagccggggcgcaagcatcgcagaaaagagggtccttgtgggagctgggggtgactagccacccaccagggtgactggggctccacagcgtggtagccacccctgggggtgagagactttgggggagttggtgccccgcccccaggccttggtagggtcatggggggcccccattttgggccagggggtgtgcaagtcggggccctgctgctgttaggttttgcggggctggtgtctggactcagcctggagcctgtctactggaactcggcgaataagaggttccaggcagagggtggttacgtgctttaccctcagatcggggaccggctagatctactttgtccccgggcccggcctcctggcccccactcctctcctagttatgagttctacaaactgtacctggtagggggtgcccagggtcggcgttgtgaggcaccccctgccccaaaccttcttctcacatgtgaccggccagacctggacctccgcttcaccatcaagttccaggaatacagccctaacctctggggccacgagttcagatcccaccacgattactacataattgccacatcagatgggacccgggaaggcctggagagcttgcagggaggtgtgtgcctaaccagaggcatgaaggtgcttctgcgagtgggacaaagtccccgaggaggagctgtaccccgaaaacctgtgtctgaaatgcccatggagagagaccgaggggcagctcacagccaggagcctgggaaggacagcataccaggtgaccccaacagcaatgcaacctcccggggtgctgaaggccccctgccccctcccagcatgcccgcggtggctggggcagcaggggggctggcgctgctcttgctgggcgtggcaggggctgggggtgccatgtgttggcggagacggcgggccaagccttcggagagtcgccaccctggtcctggctcctttgggagaggagggtctctgggcctgggtggtggaggggggatgggacctcgggaggctgagcctggggagctaggaatagccctgcggggtggtggggctgcagatccccccttctgccctcactatgagaaggtgagtggtgactacggacaccctgtgtacattgtgcaggatggccccccccagagccctccaaacatctactacaaggtatgagggctcctcccacttggctctcctcaatccagtcgcccatggggtgctcctccagtgtaatttgtggtatgaggtacacctgcgccatgactttggccccctttgccccaccggctctttggctccttctggctatagcccccatctccagttttaggatcccttaagactcgactacacctcttcctgccctccctctgtctctgcctcttaggggaggggggcacaggctcagcctccttcaatcactacacaggtgtccttttccttcgcccacccagagtaggggtgggaacggtctgtcttttggttggcacctctttctgcctctcaccgtttttctcttctctatttcttattctctctctccctctcctgtgtctaggtctgttctcttcctcctccctagcctcctcctccttacatctcctttaaccctcttggcttcttgtccttcctgtgcctctcacgtgtctcctaggttggggcatcaaagtatctctccctcggctcttggccctttccaacttttcataccaactgctcccctccgtctgccaaaaacgggggcttctgggggttggaggggagattctggcactctacccccccagctccaggcatgggcacagggcctctttccctgcctttctatgtacttactccagccatttggggtggttactgggccacagcaaactaccctgagaagaagtgtcctgttgtatccagtggctgataggaagacatgaagcagtgaagacatgatggactggatctgatgctaaatgggcatcagataggaagtgacttgttccagacaagaagtgaccaggcctggacagaaatggcctgggaagtaagtggcagcagcaggaactggaagtgccttcgtccagaacaggaagtcgcacttctgaaataggaagtggtctggctggaattccaagtggcttagtctggggaggtggtgggggtgggggtgggggcatggggaagtggatggttcttaccctgtggagaaaggggcaggaggaacctcctgtgttaggaggaagctggagcttaccactgtgagaggacagatgtggactgagaattttcttagtgctcagtggcacttcccaaggactcccctccccttgtgctctgtgcggtttttaggacagctaagatgactgccacctgttgtggcaggcccgatttgtcttgttctccccttactgtaccccgatataatctctgttgatcaacaggactaccccaagaatccacatgttctcccccgtaaccaggcagctgtctggttcatgccttcttcccttcaaacccaacccagcgcccttgttagtgaagaggtggtccatggactgatgacagttattagcactggatgctgtttccatagtgacaagcctatacctcttcccaccctttagtgcgcagtgggctgctgcttcagtatcctcccagctcagttttattagatcaaagctgcccttgggcaccatgttggccacctcaatcaccagccaaaatggtcgctttgtccaccagaggtcaagccatctttctggcgctgtagttcccagctccttctagggaacaggaagttgatattgccatgggggaggtggcggggtgtggccgtcacctcaatagttttactgtaaaagggaaatttgaacaagaacaacaacaacaaaaaaaaaaaaacaaagaaaaaaataaaaaactttaaaagttga

SEQ ID NO: 106 - DNA, 655 bp, human
gcgcaggcgcgcggggcaagagggtggcagtgcgcctgcgccgcgtcggcgtgcggaacgccgcggtgtctcggcgcctctgcgcgcgggaagatggcggaacaggctaccaagtccgtgctgtttgtgtgtctgggtaacatttgtcgatcacccattgcagaagcagttttcaggaaacttgtaaccgatcaaaacatctcagagaattggagggtagacagcgcggcaacttccgggtatgagatagggaacccccctgactaccgagggcagagctgcatgaagaggcacggcattcccatgagccacgttgcccggcaggtaccgtccttggacttgaagttgtgtgttttgtgtttcagtgggtcattgacagcggtgctgtttctgactggaacgtgggccggtccccagacccaagagctgtgagctgcctaagaaatcatggcattcacacagcccataaagcaagacaggtagacaagctcttgttcaatttctaatatatagagtccagtaacttgagaagtagcgaaaggattaaccagacttgtatattaatgaatgtgtttatttagggtgagcttaaccagctatggtgtgtccattttgtttcacttctggttgcacggtgttgaaagacttgcctgac

SEQ ID NO: 107 - DNA, 1549 bp, human
tggcagtgcgcctgcgccgcgtcggcgtgcggaacgccgcggtgtctcggcgcctctgcgcgcgggaagatggcggaacaggctaccaagtccgtgctgtttgtgtgtctgggtaacatttgtcgatcacccattgcagaagcagttttcaggaaacttgtaaccgatcaaaacatctcagagaattgggtcattgacagcggtgctgtttctgactggaacgtgggccggtccccagacccaagagctgtgagctgcctaagaaatcatggcattcacacagcccataaagcaagacagattaccaaagaagattttgccacatttgattatatactatgtatggatgaaagcaatctgagagatttgaatagaaaaagtaatcaagttaaaacctgcaaagctaaaattgaactacttgggagctatgatccacaaaaacaacttattattgaagatccctattatgggaatgactctgactttgagacggtgtaccagcagtgtgtcaggtgctgcagagcgttcttggagaaggcccactgaggcaggttcgtgccctgctgcggccagcctgactagaccccaccctgaggtcctgcatttctcagtcggtgtgtaatcacgttccagggcccaaagcccagctctttgttcagttgacttactgtttcttaccttaaaaagtaattgtagatggaaatcagttgtgtttggcaggagaatcaataaaaatctttgattcagacagcttatggggtattttaagcattcttagactagttgaacatctcactttgccccagttacaaaaatagtagaacaagcaacataaaacaatgaaggaaaacctcacttgaaggcccaggtcaacatctaagcctgttgagacttagataatcgagtctacctcttcagtaggtttgtgtggatggcctggagggcaggtgccctctgctccccagtgctacctctctcttccctagggccttttgtggattgacagtagtcccctccgtaggagctcacagtctagattagaagtgttttaatttctacacacccatagtgcacacttgtatattgaaaagatagggaagagagaaacatttatggaatcagtcgttggcaccttcaatacttcatgatttttgtcgagtttacttcatgaggaggtcagcccattggctcccatctgaaccactttgcctctgaaacttaattacatccagaaagaaggacacttgtatgctagtctatggtcagttgaggaatatgactgtttttatatgcacatgtaacccaaatgtccaatataaattggcttattttttaaaataattttaaaagttgggaaaagtgttattatttggcatgcttaaatattgaataagtattcttcatcagcatttaataaatgtataggcagatgtaaggtaatttctgtgtattttgagataatgtcaaaatcatgaatatttcaaaataaactggggagttataaaaatacaactagagatataaaaaaaaaaaaaaaaaaaaaaaaaaa

SEQ ID NO: 108 - DNA, 1549 bp, human
tggcagtgcgcctgcgccgcgtcggcgtgcggaacgccgcggtgtctcggcgcctctgcgcgcgggaagatggcggaacaggctaccaagtccgtgctgtttgtgtgtctgggtaacatttgtcgatcacccattgcagaagcagttttcaggaaacttgtaaccgatcaaaacatctcagagaattggagggtagacagcgcggcaacttccgggtatgagatagggaacccccctgactaccgagggcagagctgcatgaagaggcacggcattcccatgagccacgttgcccggcagattaccaaagaagattttgccacatttgattatatactatgtatggatgaaagcaatctgagagatttgaatagaaaaagtaatcaagttaaaacctgcaaagctaaaattgaactacttgggagctatgatccacaaaaacaacttattattgaagatccctattatgggaatgactctgactttgagacggtgtaccagcagtgtgtcaggtgctgcagagcgttcttggagaaggcccactgaggcaggttcgtgccctgctgcggccagcctgactagaccccaccctgaggtcctgcatttctcagtcggtgtgtaatcacgttccagggcccaaagcccagctctttgttcagttgacttactgtttcttaccttaaaaagtaattgtagatggaaatcagttgtgtttggcaggagaatcaataaaaatctttgattcagacagcttatggggtattttaagcattcttagactagttgaacatctcactttgccccagttacaaaaatagtagaacaagcaacataaaacaatgaaggaaaacctcacttgaaggcccaggtcaacatctaagcctgttgagacttagataatcgagtctacctcttcagtaggtttgtgtggatggcctggagggcaggtgccctctgctccccagtgctacctctctcttccctagggccttttgtggattgacagtagtcccctccgtaggagctcacagtctagattagaagtgttttaatttctacacacccatagtgcacacttgtatattgaaaagatagggaagagagaaacatttatggaatcagtcgttggcaccttcaatacttcatgatttttgtcgagtttacttcatgaggaggtcagcccattggctcccatctgaaccactttgcctctgaaacttaattacatccagaaagaaggacacttgtatgctagtctatggtcagttgaggaatatgactgtttttatatgcacatgtaacccaaatgtccaatataaattggcttattttttaaaataattttaaaagttgggaaaagtgttattatttggcatgcttaaatattgaataagtattcttcatcagcatttaataaatgtataggcagatgtaaggtaatttctgtgtattttgagataatgtcaaaatcatgaatatttcaaaataaactggggagttataaaaatacaactagagatataaaaaaaaaaaaaaaaaaaaaaaaaaa

SEQ ID NO: 109 - DNA, 3055 bp, mouse
ggggcgccagggtctgcaccgaaacatggcagaggttgggtccaagtcagtgctgttcgtgtgtctcggtaacatttgccggtcacccattgcagaagcagtattcaggaaactggtaactgatgaaaaggtttcagataattggaggatagacagtgcggctacatccacctatgaagtggggaaccctcctgactatcgagggcagaactgcatgagaaaacatggcatccacatgcagcacattgcacggcagattacaaaagaagactttgccacattcgattatatactatgtatggatgaaagcaatctgagagatctcaatagaaaaagtaatcaagttaaaaactgcaaagctaaaattgagctacttgggagctatgatccacagaaacagctcatcattgaagatccctattatggcaatgactctgacttcgaggtggtgtaccagcaatgccttaggtgctgcaaggccttcctggagaagacttactagctggtcctaagccccaccattgagcagctcactcatcagtgctgtgcccaagggtggtggcagtccttagccccataccccacctctcttttcagctgacttactgtatatctttaaaataattgtaggtgggaattaggcatatgttcagaaggataaaagcatttgagtcagacagtttgaggtgtggctaagcattcttagactaactaaacctctgaccttgcggtgattacaaaacagtggaacaagcaaatatggaacaaaagaaaacaaaaacaaaaacaaaaacccagaaagtaagagtgacctagaaggtccatatcagcctctgagctcggcaagcctgggtcgtctggtctaagtggagtgtgtgcatgacccgcacccagtgtgccgtttgcttgccgtgtactctcttctctaggctctcgttgtgacaatagctccattcacggcagccttccagttaacactggcagtttaagctcagacacactgagggtgttgagggatttgagagaggagacgctggatgtgctgatgggcctgggactccagcaggccgtcctgggctggacagtgacaccctgtctaaaaggggaacaaaaataacaacggatgggagcagcagatggataaagttaccatcttcagtcttacttggtttttgtctactttcctgagctttgttcttgtttgagccactttgctttaaaaaaaaagtaagtgtgcttaaatactggtatgtgtttgtaagtgttctctcatgggcaatttacaaagttataggcaagcaagagtaatttttgtgtattttcagaaaagagacctcaaatttatatgaatgtatgtcagaaaggaacatgaattcaactgggaagttatcaaatacaactgagatacaaatccagtgtctgcctgcttcttactgacaagtgaacaagatacctaaatgttgcctccatgtgcctttttatttgcttgagtgtgaagtttgggctctcagcctctgtgttagaaagtaaagtgatgagatggatacacacaatgctgtgttggatggcgatgggtgtctaattgagagactccaggcactatccttatccttgggccttcttcatgtagctggtgctccctacccgcttcccagctgaaaaggtggtaactgtctgtcttagcctgtcttagctcaggtcactactggtgagctccagtcacgcagaacttgtagttagaagagccatcctgacgtctgaaaggaaggaagcccaggggcctaggaatatgcagtctcttcttggccagggctcctctctcgaaggaggaaagcttacacctgactcttccagaagaaagcagctatcccagcaccctctcacagaaaggccatgatgtcccagcaaaggcagacacttcagctgcctttttgggctcctgtggggttttggtcagagtcttcacaaaattaaaaccgaggaagggagaggacaggtagtcagccacaaggaggaaatggattaagtcaaagctctccaccctacttcagtgcttgcttcagaatctcagatttctctttcaggtcataagatcctattgttttcttgaaattttacctgtgtatcttacacgcagatccttggaatgtcaggttctgctttgttctacggctgtctcaaacagcacagtgtgtttataagggctcatgaacagagaaattaactttttacattcaatcaaattacatttgtttaaaatacagccattaaattttaaaactgttctcagggtgcttcttggtttgacattctcttacaatcaggtagagatggtagatgtggagtattgatggctaaatgagaccaagcgatcaggagtttatgttattcagtacttagtcacatctacacacacacacacacgcacacgtgtatatatatagtgaacaatgtgtatgtatgtttatatatacatatattctgagccttgacattgttatttaagagtcattctgaagactgttcattattccaaacacttcatttatttccttgtatttattcacagtatttacatattgtacaatacctggaatgtacttttacatttacagaggacaagtgggactggccttggcatagccacagatacatatgccactgttttcaacacaactgaggtttttttggttttcattaaaatttttcatgcagttccaaactatactttgggattttaattgtagaatacaaaatgtcaaatcatactatatgctctatgaaaatacagtttaatgttctgcctatgtttctaaagaaatattccttgtggttccacctaatcttaaaaagaaaatacctcattttacagaacaatacatcaaatgtggaatgttgtctgtttttacaatcataagagtggcaaatctcactgacagatacactgattcactgaatgcatatttgtaaactgtcagcaacatagaaaatgcaaaggaattatggaagagtgcaaaaataaatctctgtccacaggaagtgggcatgaagatgc

SEQ ID NO: 110 - DNA, 1436 bp, rat
gggggcggtttctgggcgccagggtctgcaccgaaacatggcagaggttgggtccaagtcagtgctgttcgtgtgtctcggtaacatttgccggtcacccattgcagaagcagtgttcagaaaattggtaactgatgaaaacgtttcagataactggaggatagacagtgcggctacatccacctatgaagtggggaacccccctgactatcgagggcagaactgcatgaaaaaacatggcatccacatgcaacacattgcacggcagattacaagagaagactttgccacattcgattatatactgtgtatggatgaaagcaatctgagagatctgaatagaaaaagtaatcaagttaaaaactgcaaagctaaaatcgagctacttgggagctatgatccacagaagcagctcattattgaagatccctattatggcaatgactctgacttcgaggtggtgtaccagcaatgccttaggtgctgcaaggccttcctggagaagactcactagctggtcctaaccaccaccactgagcaacccactcctcagtgctgtgcccaagggtggtggcagtccttagccccataccccacctctcttttcagctgacttactgtatatctttaaaataattgtaggtggaaatcaggcatttgttcagaaggataaaaacatttgaggcagacatttgaggtgtggctcagtattcttagactaacaaaagctctggcctcgccataattacaaaatagtggaacgagcaactgtggaacaaaagaaaacccaataaagtaagaatgacccacaaggtccagatcagcctttgagcccagcgagcctgggtagtctggtctaactggagtgtgagcatggccagcacccagtgtgctgtttgcttgccttacactctctattctatattgtctcttattgtgacaatatctccatccatggcagccttccatttaacactgggagagtttaaacccagacacaccgagggttcagatatttgagagaggagaacctggatgtgatgatgggcctggaactccagcaggccatcctgggctgtacagtgactccctgtctgaaagataaaaatgctaacagatgggagcaacaggttggtgaagttaacacctttaatctcacttggtttttgtgtagtttcttgagcttggttcctatttgagccactttgcttctttaaagagaaagtaagtgtgcttaaatagtggtgtgcgtttgtaagtgttctctcatcaacattttacaaagttacaggcaagcatgagtaattttagtgtattttcagaaaagggacctcaaatttatgtggatatatgtcagaaaagattgtgaattaaactgggatgttatcaaatacaactaaaaatacaaaaaaaaaaaaaaaaaaaaaaaaaaaaaa

SEQ ID NO: 111 - DNA, 5153 bp, human
gggcgcagaggaggaaagggagcaggcgcagggggactggaaaggcagcatgcgctcgccaggagcaacctcggcgcccagggtctgaggctgcagccccagttcgccattgtgagccgccgccgggggagtccgctagcgcagccgtgcccccgagtccccgtccgcgcagcgatggggcacctgcccacggggatacacggcgcccgccgcctcctgcctctgctctggctctttgtgctgttcaagaatgctacagctttccatgtaactgtccaagatgataataacatcgttgtctcattagaagcttcagacgtcatcagtccagcatctgtgtatgttgtgaagataactggtgaatccaaaaattatttcttcgaatttgaggaattcaacagcactttgcctcctcctgttattttcaaggccagttatcatggcctttattatataatcactctggtagtggtaaatggaaatgtggtgaccaagccatccagatcaatcactgtgttaacaaaacctctacctgtaaccagtgtttccatatatgactataaaccttctcctgaaacaggagtcctgtttgaaatacattatccagaaaaatataacgttttcacaagagtgaacattagctactgggaaggtaaagacttccggacaatgctatataaagatttctttaagggaaaaacagtatttaatcactggctgccaggaatgtgttatagtaatatcacctttcagctggtatctgaggcaacttttaataaaagtacccttgttgagtacagtggtgtcagtcacgaacccaaacagcacagaactgccccttatccacctcaaaatatttccgttcgtatcgtaaacttgaacaaaaacaactgggaagaacagagtggcaatttcccagaagaatccttcatgagatcacaagatacaataggaaaagaaaaactcttccattttacagaagaaacccctgaaattccctcgggcaacatttcttccggttggcctgattttaatagcagtgactatgaaactacgtctcagccatattggtgggacagtgcatctgcagctcctgaaagtgaagatgaatttgtcagcgtacttcccatggaatacgaaaataacagtacactcagtgagacagagaagtcaacatcaggctctttctcctttttccctgtgcaaatgatattgacctggttaccacccaaaccacccactgcttttgatgggttccatatccatattgaacgagaagagaactttactgaatatttgatggtggatgaagaagcacatgaatttgttgcagaactgaaggaacctgggaaatataagttatctgtgacaacctttagttcctcaggatcttgtgaaactcgaaaaagtcagtcagcaaaatcactcagcttttatatcagtccttcaggagagtggattgaagaactgaccgagaagccgcagcacgtgagtgtccacgttttaagctcaaccactgccttgatgtcctggacatcttcccaagagaactacaacagcaccattgtgtctgtggtgtcgctgacctgccagaaacaaaaggagagccagaggcttgaaaagcagtactgcactcaggtgaactcaagcaaacctattattgaaaatctggttcctggtgcccagtaccaggttgtaatatacctaaggaaaggccctttgattggaccaccttcagatcctgtgacatttgctattgttcccacaggaataaaggatttaatgctctatcctttgggtcctacggccgtggttctgagctggaccagaccttatttaggcgtgttcagaaaatacgtggttgaaatgttttatttcaaccctgctacaatgacatcagagtggaccacctactatgaaatagcagcaactgtttccttaactgcatccgtgagaatagctaatctgctgccagcatggtactacaacttccgggttaccatggtgacgtggggagatccagaattgagctgctgtgacagctctaccatcagcttcataacagccccagtggctccggaaatcacttctgtggaatatttcaacagtctgttatatatcagttggacatatggggatgatacaacggacttgtcccattctagaatgcttcactggatggtggttgcagaaggaaaaaagaaaattaaaaagagtgtaacacgcaatgtcatgactgcaattctcagcttgcctccaggcgacatctataacctctcagtaactgcttgtactgaaagaggaagtaatacctccatgctccgccttgtcaagctagaaccagctccacccaaatcactcttcgcagtgaacaaaacccagacttcagtgactttgctgtgggtggaagagggagtagctgatttctttgaagttttctgtcaacaagttggctccagtcagaaaaccaaacttcaggaaccagttgctgtttcttcccatgtcgtgaccatctccagccttcttcctgccactgcctacaattgtagtgtcaccagctttagccatgacagccccagtgtccctacgttcatagccgtctcaacaatggttacagagatgaatcccaatgtggtagtgatctccgtgctggccatccttagcacacttttaattggactgttgcttgttaccctcattattcttaggaaaaagcatctgcagatggctagggagtgtggagctggtacatttgtcaattttgcatccttagagagggatggaaagcttccatacaactggcgtaggagtatatttgctttcttaaccctgctaccctcatgtctttggactgattatcttttggcattttatattaatccttggagtaaaaatggtttaaagaagaggaaactgacaaacccggttcaactggatgactttgatgcctatattaaggatatggccaaagactctgactataaattttctcttcagtttgaggagttgaaattgattggactggatatcccacactttgctgcagatcttccactgaatcgatgtaaaaaccgttacacaaacatcctaccatatgacttcagccgtgtgagattagtctccatgaatgaagaggaaggtgcagactacatcaatgccaactatattcctggatacaactcaccccaggagtatattgccacccaggggccactgcctgaaaccagaaatgacttctggaagatggtcctgcaacaaaagtctcagattattgtcatgctcactcagtgtaatgagaaaaggagggtgaaatgtgaccattactggccattcacggaagaacctatagcctatggagacatcactgtggagatgatttcagaggaagagcaggacgactgggcctgtagacacttccggatcaactatgctgacgagatgcaggatgtgatgcattttaactacactgcatggcctgatcatggtgtgcccacagcaaatgctgcagaaagtatcctgcagtttgtacacatggtccgacagcaagctaccaagagcaaaggtcccatgatcattcactgcagtgctggcgtgggacggacaggaacattcattgccctggacaggctcttgcagcacattcgggatcatgagtttgttgacatcttagggctggtgtcagaaatgaggtcataccggatgtctatggtacagacagaggagcagtacatttttatccatcagtgtgtgcaactgatgtggatgaagaagaagcagcagttctgcatcagtgatgtcatatacgagaatgttagcaagtcctagttcagaatccggagcagagaggacatgatgtgcgcccatcctcccttgcttccagattgttttagtgggccctgatggtcatttttctaaacagaggccctgctttgtaatatgtggccaaggagataatttatctcacagaagcaccgggaagacttagccttaaagagcctacagtgtccttttggactctttcacttcgggacatttaataatggaccaaattcaacagaacaccaggaaggtcaagacgctctccaaagggcaggaagtacagcacttccgaagagtttagttggccctttgctggttgggctgagttttttatttttaagtgtttgtttttcagtgcaataatttttgtgtgtgtgtgattcttatcagaaagttgaattgttttctgcctacaccgttcatcagccccataacccaggaaggaacaggcattgttagcatcagattatacctcattattaaaaggaggcatggccacacatgaagaaatggtcattctacttcaaagaaattgagccagcactatctgtactccaacattaccggatctggattggggaggttggtcagggaagagaggggttctacccacagatcaactgtgtaatcttttactattcaagctataattcagcttcaaagtagagtagaaaaaaaattgtcttaactgttctagttcttgatggttttcttccttattaacagttggtgtttcttccttggcccttttggactaatgttactgtccaagttctttctcaagaaaccacatctggttcagaagagtgtcaagttggactctttgaactctgttgctgtctgagcaatcgtggtgcctagactttgcattccttgttctgttgacctgcatacatgtgagagctatttctttaagaactatataggctgtgaaaacgcactttctttcccccaaagagctgggaatttatgaagttatggcaatgaactgcagcatgctgggacaattatttgactacttttttttgtaatattgtcaaatgtctctatggattctgacagagatttctttttgttttgttattcttttggttgtcagtttcattttaacgagtgtaactagtaacattttattctttggattttgtataattacagtacatgattgtgtattgtgacatgaatgctgtcaaaatgacattgatggcattgtgaagcctgttactttgtgtcacttcctgataaataagaggtgatgacatggatatacaacagaaaacactttgagttgaaagtaaacacaagctggctgcttccctgtggcaactgtggct

SEQ ID NO: 112 - DNA, 5069 bp, human
gggcgcagaggaggaaagggagcaggcgcagggggactggaaaggcagcatgcgctcgccaggagcaacctcggcgcccagggtctgaggctgcagccccagttcgccattgtgagccgccgccgggggagtccgctagcgcagccgtgcccccgagtccccgtccgcgcagcgatggggcacctgcccacggggatacacggcgcccgccgcctcctgcctctgctctggctctttgtgctgttcaagaatgctacagctttccatgtaactgtccaagatgataataacatcgttgtctcattagaagcttcagacgtcatcagtccagcatctgtgtatgttgtgaagataactggtgaatccaaaaattatttcttcgaatttgaggaattcaacagcactttgcctcctcctgttattttcaaggccagttatcatggcctttattatataatcactctggtagtggtaaatggaaatgtggtgaccaagccatccagatcaatcactgtgttaacaaaacctctacctgtaaccagtgtttccatatatgactataaaccttctcctgaaacaggagtcctgtttgaaatacattatccagaaaaatataacgttttcacaagagtgaacattagctactgggaaggtaaagacttccggacaatgctatataaagatttctttaagggaaaaacagtatttaatcactggctgccaggaatgtgttatagtaatatcacctttcagctggtatctgaggcaacttttaataaaagtacccttgttgagtacagtggtgtcagtcacgaacccaaacagcacagaactgccccttatccacctcaaaatatttccgttcgtatcgtaaacttgaacaaaaacaactgggaagaacagagtggcaatttcccagaagaatccttcatgagatcacaagatacaataggaaaagaaaaactcttccattttacagaagaaacccctgaaattccctcgggcaacatttcttccggttggcctgattttaatagcagtgactatgaaactacgtctcagccatattggtgggacagtgcatctgcagctcctgaaagtgaagatgaatttgtcagcgtacttcccatggaatacgaaaataacagtacactcagtgagacagagaagtcaacatcaggctctttctcctttttccctgtgcaaatgatattgacctggttaccacccaaaccacccactgcttttgatgggttccatatccatattgaacgagaagagaactttactgaatatttgatggtggatgaagaagcacatgaatttgttgcagaactgaaggaacctgggaaatataagttatctgtgacaacctttagttcctcaggatcttgtgaaactcgaaaaagtcagtcagcaaaatcactcagcttttatatcagtccttcaggagagtggattgaagaactgaccgagaagccgcagcacgtgagtgtccacgttttaagctcaaccactgccttgatgtcctggacatcttcccaagagaactacaacagcaccattgtgtctgtggtgtcgctgacctgccagaaacaaaaggagagccagaggcttgaaaagcagtactgcactcaggtgaactcaagcaaacctattattgaaaatctggttcctggtgcccagtaccaggttgtaatatacctaaggaaaggccctttgattggaccaccttcagatcctgtgacatttgctattgttcccacaggaataaaggatttaatgctctatcctttgggtcctacggccgtggttctgagctggaccagaccttatttaggcgtgttcagaaaatacgtggttgaaatgttttatttcaaccctgctacaatgacatcagagtggaccacctactatgaaatagcagcaactgtttccttaactgcatccgtgagaatagctaatctgctgccagcatggtactacaacttccgggttaccatggtgacgtggggagatccagaattgagctgctgtgacagctctaccatcagcttcataacagccccagtggctccggaaatcacttctgtggaatatttcaacagtctgttatatatcagttggacatatggggatgatacaacggacttgtcccattctagaatgcttcactggatggtggttgcagaaggaaaaaagaaaattaaaaagagtgtaacacgcaatgtcatgactgcaattctcagcttgcctccaggcgacatctataacctctcagtaactgcttgtactgaaagaggaagtaatacctccatgctccgccttgtcaagctagaaccagctccacccaaatcactcttcgcagtgaacaaaacccagacttcagtgactttgctgtgggtggaagagggagtagctgatttctttgaagttttctgtcaacaagttggctccagtcagaaaaccaaacttcaggaaccagttgctgtttcttcccatgtcgtgaccatctccagccttcttcctgccactgcctacaattgtagtgtcaccagctttagccatgacagccccagtgtccctacgttcatagccgtctcaacaatggttacagagatgaatcccaatgtggtagtgatctccgtgctggccatccttagcacacttttaattggactgttgcttgttaccctcattattcttaggaaaaagcatctgcagatggctagggagtgtggagctggtacatttgtcaattttgcatccttagagagggatggaaagcttccatacaactggagtaaaaatggtttaaagaagaggaaactgacaaacccggttcaactggatgactttgatgcctatattaaggatatggccaaagactctgactataaattttctcttcagtttgaggagttgaaattgattggactggatatcccacactttgctgcagatcttccactgaatcgatgtaaaaaccgttacacaaacatcctaccatatgacttcagccgtgtgagattagtctccatgaatgaagaggaaggtgcagactacatcaatgccaactatattcctggatacaactcaccccaggagtatattgccacccaggggccactgcctgaaaccagaaatgacttctggaagatggtcctgcaacaaaagtctcagattattgtcatgctcactcagtgtaatgagaaaaggagggtgaaatgtgaccattactggccattcacggaagaacctatagcctatggagacatcactgtggagatgatttcagaggaagagcaggacgactgggcctgtagacacttccggatcaactatgctgacgagatgcaggatgtgatgcattttaactacactgcatggcctgatcatggtgtgcccacagcaaatgctgcagaaagtatcctgcagtttgtacacatggtccgacagcaagctaccaagagcaaaggtcccatgatcattcactgcagtgctggcgtgggacggacaggaacattcattgccctggacaggctcttgcagcacattcgggatcatgagtttgttgacatcttagggctggtgtcagaaatgaggtcataccggatgtctatggtacagacagaggagcagtacatttttatccatcagtgtgtgcaactgatgtggatgaagaagaagcagcagttctgcatcagtgatgtcatatacgagaatgttagcaagtcctagttcagaatccggagcagagaggacatgatgtgcgcccatcctcccttgcttccagattgttttagtgggccctgatggtcatttttctaaacagaggccctgctttgtaatatgtggccaaggagataatttatctcacagaagcaccgggaagacttagccttaaagagcctacagtgtccttttggactctttcacttcgggacatttaataatggaccaaattcaacagaacaccaggaaggtcaagacgctctccaaagggcaggaagtacagcacttccgaagagtttagttggccctttgctggttgggctgagttttttatttttaagtgtttgtttttcagtgcaataatttttgtgtgtgtgtgattcttatcagaaagttgaattgttttctgcctacaccgttcatcagccccataacccaggaaggaacaggcattgttagcatcagattatacctcattattaaaaggaggcatggccacacatgaagaaatggtcattctacttcaaagaaattgagccagcactatctgtactccaacattaccggatctggattggggaggttggtcagggaagagaggggttctacccacagatcaactgtgtaatcttttactattcaagctataattcagcttcaaagtagagtagaaaaaaaattgtcttaactgttctagttcttgatggttttcttccttattaacagttggtgtttcttccttggcccttttggactaatgttactgtccaagttctttctcaagaaaccacatctggttcagaagagtgtcaagttggactctttgaactctgttgctgtctgagcaatcgtggtgcctagactttgcattccttgttctgttgacctgcatacatgtgagagctatttctttaagaactatataggctgtgaaaacgcactttctttcccccaaagagctgggaatttatgaagttatggcaatgaactgcagcatgctgggacaattatttgactacttttttttgtaatattgtcaaatgtctctatggattctgacagagatttctttttgttttgttattcttttggttgtcagtttcattttaacgagtgtaactagtaacattttattctttggattttgtataattacagtacatgattgtgtattgtgacatgaatgctgtcaaaatgacattgatggcattgtgaagcctgttactttgtgtcacttcctgataaataagaggtgatgacatggatatacaacagaaaacactttgagttgaaagtaaacacaagctggctgcttccctgtggcaactgtggct

SEQ ID NO: 113 - DNA, 4064 bp, human
aagtaaaaaaatggaagggggaaaaggcaaagtattctgccttccaagttagatagctatctttatgaaaggacatatttcaaaggcaatataaagtctttatggtgctcttacctacctatatttgaattgggggatgcttcacctgcttattagtgaaagaagaaagaatacacttagtaaattaaattttttttaaaactttgtctttgctcagaaccagctccacccaaatcactcttcgcagtgaacaaaacccagacttcagtgactttgctgtgggtggaagagggagtagctgatttctttgaagttttctgtcaacaagttggctccagtcagaaaaccaaacttcaggaaccagttgctgtttcttcccatgtcgtgaccatctccagccttcttcctgccactgcctacaattgtagtgtcaccagctttagccatgacagccccagtgtccctacgttcatagccgtctcaacaatggttacagagatgaatcccaatgtggtagtgatctccgtgctggccatccttagcacacttttaattggactgttgcttgttaccctcattattcttaggaaaaagcatctgcagatggctagggagtgtggagctggtacatttgtcaattttgcatccttagagagggatggaaagcttccatacaactggcgtaggagtatatttgctttcttaaccctgctaccctcatgtctttggactgattatcttttggcattttatattaatccttggagtaaaaatggtttaaagaagaggaaactgacaaacccggttcaactggatgactttgatgcctatattaaggatatggccaaagactctgactataaattttctcttcagtttgaggagttgaaattgattggactggatatcccacactttgctgcagatcttccactgaatcgatgtaaaaaccgttacacaaacatcctaccatatgacttcagccgtgtgagattagtctccatgaatgaagaggaaggtgcagactacatcaatgccaactatattcctggatacaactcaccccaggagtatattgccacccaggggccactgcctgaaaccagaaatgacttctggaagatggtcctgcaacaaaagtctcagattattgtcatgctcactcagtgtaatgagaaaaggagggtgaaatgtgaccattactggccattcacggaagaacctatagcctatggagacatcactgtggagatgatttcagaggaagagcaggacgactgggcctgtagacacttccggatcaactatgctgacgagatgcaggatgtgatgcattttaactacactgcatggcctgatcatggtgtgcccacagcaaatgctgcagaaagtatcctgcagtttgtacacatggtccgacagcaagctaccaagagcaaaggtcccatgatcattcactgcagtgctggcgtgggacggacaggaacattcattgccctggacaggctcttgcagcacattcgggatcatgagtttgttgacatcttagggctggtgtcagaaatgaggtcataccggatgtctatggtacagacagaggagcagtacatttttatccatcagtgtgtgcaactgatgtggatgaagaagaagcagcagttctgcatcagtgatgtcatatacgagaatgttagcaagtcctagttcagaatccggagcagtaagtggagaagagctctccacgagtgttcagtcttagaactattagagggggatgtgatggatgggacaaaagacagcagtagccatttgtattgactctgacttcacatgagtatttcttcccagctcctggcctcacatgggtggtcacagggagaaacaagtactgtagcagatctttgagtttcaatgcaccttggttggtgttggcaacaaacaggagcttctgcacatcatgatgactttacctccattccctctacccagaaccctaaattattctgttattggatctgtgcctgtaatatcaggatactaccatccaaatctatctagatatcttgtgcaaatattttattgattacaagggctgtatacggggttacaaaaagacatgagctggattggacactcctaaaaccaaaaacaacagtgacaatagagtctcaggatagcagagtctgaaaataccttggtctcccccattatgtgagcccttatttgagagcttcatgaagacacttgtaacatattcaacgtcctgtactccagttttgactacgagatcagattttggaggtgtaagtaatcttggctgaggtaacagtaatctgcccatttagttcagtaaacagactgtagagtgtctgactatactgggggaagaggagccaatgacagggtagggagatgacagtggtgcatgatgggagaatcatgaaagtctgggaagcatatggaccagtgggaaggataggattagcactgcacctctacatccatcaagagagacagagcgcacaatggagcaggaaggataaaaaataaagaaagacagagacaaacaaatttgctgggagagggaaagacattcagacccacagaaaggaggcagcacacagagaaagatgcacagatcaacccacatctgcatgggttgtgagactgagcatagtgagagcagtggtggagcaatagaagattgctgtgacaccaggctgcttactgtctttctttgtctcattcacaggagaggacatgatgtgcgcccatcctcccttgcttccagattgttttagtgggccctgatggtcatttttctaaacagaggccctgctttgtaatatgtggccaaggagataatttatctcacagaagcaccgggaagacttagccttaaagagcctacagtgtccttttggactctttcacttcgggacatttaataatggaccaaattcaacagaacaccaggaaggtcaagacgctctccaaagggcaggaagtacagcacttccgaagagtttagttggccctttgctggttgggctgagttttttatttttaagtgtttgtttttcagtgcaataatttttgtgtgtgtgtgattcttatcagaaagttgaattgttttctgcctacaccgttcatcagccccataacccaggaaggaacaggcattgttagcatcagattatacctcattattaaaaggaggcatggccacacatgaagaaatggtcattctacttcaaagaaattgagccagcactatctgtactccaacattaccggatctggattggggaggttggtcagggaagagaggggttctacccacagatcaactgtgtaatcttttactattcaagctataattcagcttcaaagtagagtagaaaaaaaattgtcttaactgttctagttcttgatggttttcttccttattaacagttggtgtttcttccttggcccttttggactaatgttactgtccaagttctttctcaagaaaccacatctggttcagaagagtgtcaagttggactctttgaactctgttgctgtctgagcaatcgtggtgcctagactttgcattccttgttctgttgacctgcatacatgtgagagctatttctttaagaactatataggctgtgaaaacgcactttctttcccccaaagagctgggaatttatgaagttatggcaatgaactgcagcatgctgggacaattatttgactacttttttttgtaatattgtcaaatgtctctatggattctgacagagatttctttttgttttgttattcttttggttgtcagtttcattttaacgagtgtaactagtaacattttattctttggattttgtataattacagtacatgattgtgtattgtgacatgaatgctgtcaaaatgacattgatggcattgtgaagcctgttactttgtgtcacttcctgataaataagaggtgatgacatggatatacaacagaaaacactttgagttgaaagtaaacacaagctggctgcttccctgtggcaactgtggct

SEQ ID NO: 114 - DNA, 3980 bp, human
aagtaaaaaaatggaagggggaaaaggcaaagtattctgccttccaagttagatagctatctttatgaaaggacatatttcaaaggcaatataaagtctttatggtgctcttacctacctatatttgaattgggggatgcttcacctgcttattagtgaaagaagaaagaatacacttagtaaattaaattttttttaaaactttgtctttgctcagaaccagctccacccaaatcactcttcgcagtgaacaaaacccagacttcagtgactttgctgtgggtggaagagggagtagctgatttctttgaagttttctgtcaacaagttggctccagtcagaaaaccaaacttcaggaaccagttgctgtttcttcccatgtcgtgaccatctccagccttcttcctgccactgcctacaattgtagtgtcaccagctttagccatgacagccccagtgtccctacgttcatagccgtctcaacaatggttacagagatgaatcccaatgtggtagtgatctccgtgctggccatccttagcacacttttaattggactgttgcttgttaccctcattattcttaggaaaaagcatctgcagatggctagggagtgtggagctggtacatttgtcaattttgcatccttagagagggatggaaagcttccatacaactggagtaaaaatggtttaaagaagaggaaactgacaaacccggttcaactggatgactttgatgcctatattaaggatatggccaaagactctgactataaattttctcttcagtttgaggagttgaaattgattggactggatatcccacactttgctgcagatcttccactgaatcgatgtaaaaaccgttacacaaacatcctaccatatgacttcagccgtgtgagattagtctccatgaatgaagaggaaggtgcagactacatcaatgccaactatattcctggatacaactcaccccaggagtatattgccacccaggggccactgcctgaaaccagaaatgacttctggaagatggtcctgcaacaaaagtctcagattattgtcatgctcactcagtgtaatgagaaaaggagggtgaaatgtgaccattactggccattcacggaagaacctatagcctatggagacatcactgtggagatgatttcagaggaagagcaggacgactgggcctgtagacacttccggatcaactatgctgacgagatgcaggatgtgatgcattttaactacactgcatggcctgatcatggtgtgcccacagcaaatgctgcagaaagtatcctgcagtttgtacacatggtccgacagcaagctaccaagagcaaaggtcccatgatcattcactgcagtgctggcgtgggacggacaggaacattcattgccctggacaggctcttgcagcacattcgggatcatgagtttgttgacatcttagggctggtgtcagaaatgaggtcataccggatgtctatggtacagacagaggagcagtacatttttatccatcagtgtgtgcaactgatgtggatgaagaagaagcagcagttctgcatcagtgatgtcatatacgagaatgttagcaagtcctagttcagaatccggagcagtaagtggagaagagctctccacgagtgttcagtcttagaactattagagggggatgtgatggatgggacaaaagacagcagtagccatttgtattgactctgacttcacatgagtatttcttcccagctcctggcctcacatgggtggtcacagggagaaacaagtactgtagcagatctttgagtttcaatgcaccttggttggtgttggcaacaaacaggagcttctgcacatcatgatgactttacctccattccctctacccagaaccctaaattattctgttattggatctgtgcctgtaatatcaggatactaccatccaaatctatctagatatcttgtgcaaatattttattgattacaagggctgtatacggggttacaaaaagacatgagctggattggacactcctaaaaccaaaaacaacagtgacaatagagtctcaggatagcagagtctgaaaataccttggtctcccccattatgtgagcccttatttgagagcttcatgaagacacttgtaacatattcaacgtcctgtactccagttttgactacgagatcagattttggaggtgtaagtaatcttggctgaggtaacagtaatctgcccatttagttcagtaaacagactgtagagtgtctgactatactgggggaagaggagccaatgacagggtagggagatgacagtggtgcatgatgggagaatcatgaaagtctgggaagcatatggaccagtgggaaggataggattagcactgcacctctacatccatcaagagagacagagcgcacaatggagcaggaaggataaaaaataaagaaagacagagacaaacaaatttgctgggagagggaaagacattcagacccacagaaaggaggcagcacacagagaaagatgcacagatcaacccacatctgcatgggttgtgagactgagcatagtgagagcagtggtggagcaatagaagattgctgtgacaccaggctgcttactgtctttctttgtctcattcacaggagaggacatgatgtgcgcccatcctcccttgcttccagattgttttagtgggccctgatggtcatttttctaaacagaggccctgctttgtaatatgtggccaaggagataatttatctcacagaagcaccgggaagacttagccttaaagagcctacagtgtccttttggactctttcacttcgggacatttaataatggaccaaattcaacagaacaccaggaaggtcaagacgctctccaaagggcaggaagtacagcacttccgaagagtttagttggccctttgctggttgggctgagttttttatttttaagtgtttgtttttcagtgcaataatttttgtgtgtgtgtgattcttatcagaaagttgaattgttttctgcctacaccgttcatcagccccataacccaggaaggaacaggcattgttagcatcagattatacctcattattaaaaggaggcatggccacacatgaagaaatggtcattctacttcaaagaaattgagccagcactatctgtactccaacattaccggatctggattggggaggttggtcagggaagagaggggttctacccacagatcaactgtgtaatcttttactattcaagctataattcagcttcaaagtagagtagaaaaaaaattgtcttaactgttctagttcttgatggttttcttccttattaacagttggtgtttcttccttggcccttttggactaatgttactgtccaagttctttctcaagaaaccacatctggttcagaagagtgtcaagttggactctttgaactctgttgctgtctgagcaatcgtggtgcctagactttgcattccttgttctgttgacctgcatacatgtgagagctatttctttaagaactatataggctgtgaaaacgcactttctttcccccaaagagctgggaatttatgaagttatggcaatgaactgcagcatgctgggacaattatttgactacttttttttgtaatattgtcaaatgtctctatggattctgacagagatttctttttgttttgttattcttttggttgtcagtttcattttaacgagtgtaactagtaacattttattctttggattttgtataattacagtacatgattgtgtattgtgacatgaatgctgtcaaaatgacattgatggcattgtgaagcctgttactttgtgtcacttcctgataaataagaggtgatgacatggatatacaacagaaaacactttgagttgaaagtaaacacaagctggctgcttccctgtggcaactgtggct

SEQ ID NO: 115 - DNA, 5075 bp, mouse
cattaaacaacgccggctccaagcacgttctagcaggactcgggcacagaagaggagagcgatccatccgggggcacaggacgacctgccaggcgacatgcggccgcccggagccgcccgggcgcccgaagtctgaggctgccagccgggactggtcattgtaagcgccacggagaactgctggcgctgccgttccctccccggtccctggtcgcgccgcgatggggcacctgcctaggggaacgctcgggggccgccgcctgctacctctgctcgggctctttgtgctgctcaagattgttacgacgttccacgtggctgtgcaagatgacaacaatatcgttgtgtctttagaagcttctgatatagtcagcccagcatctgtgtatgttgtgagggtagctggcgaatcaaaaaactatttcttcgaatttgaggaatttaacagcacattgcctcctcctgtggtctttaaggccacatatcacggtctttattacataatcactctggtggtagtcaacgggaatgtggtcaccaaaccatccagatcaatcaccgtgttgacaaaacccttgcctgtaaccagtgtgtctatctatgactataaaccttctcctgagacaggagtcctgtttgaaatccattatccggaaaaatacaatgtgttcagcagagtgaacatcagctactgggaagggagggacttcaggacgatgctgtacaaagatttctttaaggggaaaacggtgtttaatcactggctaccaggactatgttacagtaacatcactttccagctggtatcggaggcaacttttaataaaagtacccttgtggagtacagtggtgtgagccatgaacccaaacagcacagaacagcaccatatccacctcgaaacatctctgttcgctttgtcaacttgaacaagaacaactgggaggagccgagcgggagcttccccgaggactcgttcatcaaaccaccgcaagattcaataggaagagacagacgcttccatttccccgaagaaactccggagactccccccagcaatgtgtcctccggttctccccccagcaatgtgtcctccgcttggcctgacccgaatagcacagactatgaaagcacatcacagcccttctggtgggacagtgcatccgcggcccctgaaaacgaggaggactttgtcagtgcgctgccagcagactatgacactgagaccacactcgataggacagagaagcccacagccgaccctttctctgccttccctgtgcagatgactctgagctggttaccacccaaaccgcccacagcctttgatggcttcaatatcctcatagagagggaagagaactttactgactatttgacagtggatgaagaagcccatgaattcgttgcagaactgaaggagcctgggaaatacaaactctcagtgacaacctttagctcctcgggggcctgtgagactcggaaaagccagtcagcaaaatcgctcagcttctacatcagccccacaggcgagtggattgaagaactgaccgagaaacctcagcatgtgagtgtccacgtcttaagctcaaccaccgccttgatgtcgtggacatcttctcaggagaactacaacagcaccattgtgtctgtggtgtccttgacctgccagaaacagaaggagagccagcggctggagaagcagtattgtacccaggtgaactcaagcaaacctgtaattgagaacctggttcctggtgcccagtaccaggttgtgatgtacttaagaaaaggccctttgattgggccaccttccgatcctgtgacatttgcgattgttcccactgggatcaaagatttaatgctctaccccttgggtcccactgctgtcgtgctgagctggacccgacctatcctgggagtcttcagaaaatacgtggttgaaatgttctacttcaaccccaccaccatgacctcagagtggacgacctactatgagatagcagccacagtttccttaacggcatccgtgagaatagcaagcctattgccagcgtggtactacaacttccgcgtaaccatggtgacatggggagatccagagctgagctgttgtgacagttccaccatcagcttcataacagcccccgttgctccagaaatcacgtctgtggagtacttcaacagcctgctgtacatcagttggacctatggggatgccaccactgacctgtcccactctagaatgctgcactggatggtcgttgcagaagggaggaagaaaattaaaaagagtgtgacacgcaatgtcatgacggccatccttagcctgcctccaggagatatctacaatctgtctgtcacggcctgcactgagagagggagcaacacctccttgccccgccttgtcaagctcgaaccagcccctccgaagtcactcttcgcagtgaacaaaacacagacgtcagtgaccctgctgtgggttgaggagggtgttgctgatttctttgaagtcttctgtcagcagctcggctctggccacaatggcaaactccaggagccagtagctgtgtcgtcccacgtggtgaccatctccagcctcctcccagccactgcctacaactgcagtgtcaccagcttcagccacgacactcccagtgtccctacattcatagctgtctccacaatggttacagaggtgaaccctaacgtggtggtgatctcggtgctggccatcctcagcacacttttaattggactgctcttagtgacccttgtcattctccgaaagaagcacctgcagatggctagggaatgtggagctggcacgtttgttaactttgcatccttagaaagggaagggaaactcccctacagttggcgtaggagtgtgtttgctctcttaaccctgctgccttcatgtctttggactgactatcttttggcattttatattaacccttggagtaaaaatggcttaaagaagaggaaactaacaaaccccgttcagctggatgacttcgattcttacatcaaggatatggccaaggactcggactataaattctctcttcagtttgaggagttgaagttgattggactggatattccgcactttgctgcagatctaccgctgaaccgatgtaaaaaccgctacacaaacatcctgccgtatgactttagccgggtgaggctagtctccatgaacgaagaggaaggagcagactacattaatgccaactatattcctggatacaactcaccccaggagtacattgccacccagggtcccctgccagaaaccagaaatgacttctggaagatggtcctacaacagaagtcccacatcatcgtcatgctcactcaatgcaatgagaaaaggagggtaaaatgtgaccactactggccattcacagaagaacccattgcttatggggacatcaccgtggagatggtctctgaggaagaggaggaggactgggccagtagacacttccggatcaactatgcggacgaagcgcaggacgtgatgcattttaactacacagcctggcccgatcacggcgtgcctccagcaaacgccgccgagagcatcctgcagtttgtgttcacagtgcgacagcaagccgccaagagcaaagggcccatgatcatccactgcagtgcgggtgtgggacggacaggaaccttcattgccctggacaggctcctgcaacacattcgagatcatgaatttgtggacatcttagggctggtatcagagatgcgctcacaccgaatgtcaatggtacagacagaggagcagtacatttttatccatcagtgtgtgcagctgatgtggctgaggaagaagcaacagttctgcatcagcgacgtcatctacgagaacgtcagcaaatcctagttcggaatctggagcggtgaggacatgatacctgcgcatcctcccttgcttccagagtttttataggggcttttagtcactttgctaaatcgagtccctgctgtgcagtatatggacaaggaggagatttacctcctagaaccaagaagaccttaaggagcctacagtatcatttggagtcttttcacttctagatgtttgatggaccaaattcagtagaattccagaaaggtcaccaatgctccttgaggggcaggaagcgcaatacttcctgatggctcagttggctctttgctgctcgggttgggttgattttttttttaagtgcaataatttctgtataattgtgattttttacattcacaattcagaatgttgaattgttatctgcccacaccatcgatcagtgccacagccttggaaataaccaacatcattacggagttttatctcatccctggaaaggcatggctacacaggaagacgtggtgatgaatctccttcaaagaaactgagcgagtgtgctcctcgctccaaccttgaagctacgggtcaggagtaggcaggcagagggaagagagcggttctactcacccatcagccagcttatcttttcctatttcaaatatgaaaacctgtgtttcaaagtagagtaggaaaaacattatatgtctgacttgtcatagtgggtttcttccttgttgacagttgggagtttcttccgtggctcttttgaactaatgtcacggtcctttttgaacagccagagttgattcaacagttttgagtctgactctgaactctgagatatcttggtgcctagccttcacgtttatttttctctgtgtccacctgtgtacacaaaaacagtttctccaagagctataggctgtaaaaatgcactttctttctccacccagaggagctgggaattcagaagtcacgacaacaacaaactcagcatgtaaggacaggtattggacaccatcccttaagaacattgttgagtgtctctatggattccgacaggagattctctgggtcttctttgcatttctgttgtcagagtcattttaacctgtgtagctagtggcattatattctttggattttgtatgattaaagtacatgattgtgtgttgtgaccatgaaaaaaaaaaaaaaaaaaaaaaa

SEQ ID NO: 116 - DNA, 4871 bp, rat
ttttaagcgccacggggacccgctggcgctgccatccctcccgggttcctggtcgcgccacgatggggcacctgcctagggaaaggcgcgggggccgccgcctgctacctctgctcgggctctttgtgctgctcaagattgtttcaacgttccacgtgactgtccgagacgacaacaacatcgttgtgtctttagaagcttctgatgtagtcagcccaacctccgtgtatgttgtgagggtagctggcgaatccaaaaactatttcttcgaatttgaggaatccaatggcacactgcctcctcctgtggtctttaaggccacgtatcatggtctttattacatcatcagtctggtggtagtcagtgggaatgtggtcaccaaaccatcccgatcaatcaccgtgctgacaaaacccttgcccgtaaccagtgtgtctatatatgactataagccttctcctgagacaggagtactgtttgaaattcactatccggaaaaatacaacgtgttcagcagagtgaacatcagctactgggaggggaaggatttcaggacgatgctgtacaaagacttcctgaaggggaaaaccgtgtttaatcactggctcccggggatctgctacagtaacatcactttccagctggtttctgaggcgacctttaacaaaagcaccctggtggagtgcagtggtgtgagtcacgaacccaaacaacacagaacagcgccgtatccccctcgaaacatctctgttcgctttgtcaacttgaacaagaacaactgggaagaaccaagcgggagcttccccgaggactcgttcatcaaaccgcaagacgcgataggaagagacagacccttccatttccccgaggaaacccctgagacgcccgccagcaatgcgtcttccggctggcctgacccgaacggcactgagtatgagagcacatctcagccctactggtgggacagtgcatccgcggcccctgaaaacgaggaggacttcgtcagcgtgctgccagcggactatgacactgaggccacgctcggcaggacagagaaacccacagctgaccctttctctgccttccccgtgcagatgactctgagctggttaccaccaaaaccgcctacagccttcgatggcttcaatatcctcatagagagggaagggaactttaccgactatttgacagtggatgaagaagcccacgagtttgttgccgaactgaaggagcctggaaagtacagactctcagtgacaaccttcagctcctcgggagcctgtgagactcggaaaagccagtcagcaaaatcgctcagcttctacatcagccccacaggagagtggattgaagaactgactgagaaaccgcagcacgtgagtgtccacgtcttaagctcaaccactgccttgttgtcgtggacatcttcccaggagaactacaacagcaccattgtgtctgtggtgtccctgacatgccagaaacagaaagagagccagcggctggagaagcagtattgtacccaggtgaactcaagcaaacctgtaattgagaacctggttcccggtgcccagtaccaggttgtgatgtacctaagaaaaggccctttgattgggccaccttctgatcctgtgacatttgccattgttcccacggggataaaggatttaatgctctatccattgggtcccacggcagtagtgctgagctggacccgaccttacttgggagtgttcagaaaatacgtggttgaaatgttttatttcaaccccaccaccatgacctccgagtggacgacctactacgaaatagcagcgaccgtctccttaacatcgtccgtgagaatagcaaatctattgccggcgtggtactacaactttcgcgtaaccatggtgacgtggggagatccagaactgagctgctgtgacagttccaccatcagcttcataacggcccccgtcgctccagaaatcacgtctgtggagtacttcaacagcctgctgtacatcagctggacctacggggacgccaccactgacctgtcccattcgagaatgctacactggatggtcgtggcagaagggaggaggaaaattaaaaagagtgtgacacgcaatgtcatgacggccatccttagcctgcctccaggagatatctacaacctgtctgtcacagcctgcactgagagggggagtaacacctccatgctccgccttgtcaagctagaaccagctcctccaaaatcactcttcgcagtgaacaaaacgcagacatcggtcaccctgctttgggttgaggagggcgtagctgatttctttgaagtcctctgtcagaagctcgggtctggccacgatggcaaactccaggaaccggtagctgtttcctcccacgtggtgaccatctccagcctcctcccagccactgcctacaactgcagtgtcaccagcttcagccacgacagtcccagtgtccctacgttcatagctgtctccacaatggttacagaggtgaaccctaatgtggtggtgatctcggtgctggccatcctcagcatacttttaattggactgctgttagtgacccttgtcattctgagaaagaagcacctgcagatggccagggagtgtggggctggcacgtttgtcaattttgcatccttggagagggaagggaaactcccctacagttggcgtaggagtgtctttactttcttaaccctgctgccctcatgtctgtggactgactatctgttggcattttatattaacccttggagtaaaaatggcttaaagaagaggaaactgacgaaccctgttcagctggacgattttgattcttacatcaaggacatggccaaggactctgactataaattctctcttcagtttgaggagttgaagttgattggactggatattccacactttgctgcagatcttccgctgaaccgatgtaaaaaccgctatacaaacatcctgccgtacgacttcagcagagtgaggctggtctccatgaatgaagaagaaggagcagactacattaatgccaattatattcctggctacaactcacctcaggagtacattgccacccagggaccactgccggaaaccagaaatgatttctggaagatggtcctgcagcagaagtctcgcatcattgtcatgctcactcagtgcaatgagaaaagaagggtaaaatgcgaccactactggccattcacggaagaacccattgcttatggagacatcaccgtggagatggtctctgaggaagaacaggaggactgggccagcagacacttccggatcaattatgctgacgaggcccaggatgtgatgcactttaactacacggcctggccagaccatggcgtgcctccagcaaatgctgccgagagcatcctgcagttcgtgtacactgtccggcagcaagccaccaagagcaaaggacccatgatcatccactgcagcgcgggcgtgggacggacaggcaccttcatagcccttgacaggctcttgcaacacatccgagatcacgaatttgtggacatcttggggctggtgtcagaaatgcgctcataccgaatgtcgatggtacagacagaggagcagtacatcttcatccatcagtgcgtgcagctgatgtggctgaagaagaagcaacagttctgcatcagtgacgtcatctacgagaacgtcagcaagtcctagttcagactcgggagcggtgaggccatgatgtctacccatcctcccttgcttccagaggttttataggggcctttagtcactttgtcaaatcgcgtccccgctgcgcagtttgtggacaaggaggtgatttaacctcctagaaccgagaagacttagccttaaggagcctacaataccgtttggagtcttttcacttctagacgtttgatggtccaaattcactaggatttccagaaatgctcctcctcgaagggcgggaagtgcccttcctgatggttcagtcggctctttgctgcttgggctgggtttggttttttcttttttttaagtgcaataatttctgtataatcgtgattttttttttacattcgcaattcagaatgttgaattgttatccgcccacatcactgatcagtgccacagccttgggaaggccttatcgcagagttttatctcaccactgaagaggcatggctacacacaggaagactcggtgacaaatcctcaaaggaaatgagcgcgtgtgtccctccctccaacctctcgaagctatgggtcaggagtaggtgggcagagagagaagagaggggttctactcacacgtcagccggtttatctcttcctatttcgaatatgagaacctgtgtttcgaagtagagtaggaaaaacattacttgtctgacttgtcgtagtgggtttcttccttgttgacagttgggagtttcttccgtggctcttttgaactagtgtcactgtcatggtccttttcaaacagccagagctgactcaacagttttgagtctgactctgaactctgagaaatcttggtgcctagccttctttatttttctgtccacccgtgtacacaagaacagtttctccaagagctataggctgtaaaaatgcactttctttccccacccagaggagctgggaattcagaagtcaggacaacgaactcagcatgctaggacagtcactggacaccgtcccttaagaataccgttgagcgtctccgtggattccgacaggatattctctgggttctttgcatttctgttgtcagactcattttaacccgtgtagctagtggcattttattctttggattttgtatgattaaagtacatgattatgtgttgtgaccagcgccgcgaa

SEQ ID NO: 117 - DNA, 22 bp, artificial sequence
  ephrin-A1f
ttcaaatcccaagttccgtgag

SEQ ID NO: 118 - DNA, 21 bp, artificial sequence
  ephrin-A2f
aactcttcacccccttttccc

SEQ ID NO: 119 - DNA, 24 bp, artificial sequence
  ephrin-A3f
tacatctccacgcccactcacaac

SEQ ID NO: 120 - DNA, 20 bp, artificial sequence
  ephrin-A4f
cgatgccttttgcccctttc

SEQ ID NO: 121 - DNA, 21 bp, artificial sequence
  ephrin-A5f
aacagcagcaaccccagattc

SEQ ID NO: 122 - DNA, 25 bp, artificial sequence
  EphA1f
gccttacgccaactacacatttacc

SEQ ID NO: 123 - DNA, 22 bp, artificial sequence
  EphA2f
tgaggatgtccgtttttccaag

SEQ ID NO: 124 - DNA, 22 bp, artificial sequence
  EphA3f
gcaatgctgggtatgaagaacg

SEQ ID NO: 125 - DNA, 22 bp, artificial sequence
  EphA4f
gaacaactggctgcgaactgac

SEQ ID NO: 126 - DNA, 22 bp, artificial sequence
  EphA5f
gcaagtattatggggcagttcg

SEQ ID NO: 127 - DNA, 22 bp, artificial sequence
  EphA6f
tcctctttggttgaagtgcggg

SEQ ID NO: 128 - DNA, 24 bp, artificial sequence
  EphA7f
agcagtctccagtgaacagaatcc

SEQ ID NO: 129 - DNA, 24 bp, artificial sequence
  EphA8f
tccatcaacgaggtagacgagtcc

SEQ ID NO: 130 - DNA, 24 bp, artificial sequence
  ephrin-A1r
cagcagcagtggtaggagcaatac

SEQ ID NO: 131 - DNA, 24 bp, artificial sequence
  ephrin-A2r
ctcattggttggacgcacataaac

SEQ ID NO: 132 - DNA, 22 bp, artificial sequence
  ephrin-A3r
tccctcaaagtcttccaacacg

SEQ ID NO: 133 - DNA, 22 bp, artificial sequence
  ephrin-A4r
atgtgatgacccgctctccttg

SEQ ID NO: 134 - DNA, 24 bp, artificial sequence
  ephrin-A5r
aagcatcgccaggaggaacagtag

SEQ ID NO: 135 - DNA, 24 bp, artificial sequence
  EphA1r
gtccacatagggttttagccacag

SEQ ID NO: 136 - DNA, 22 bp, artificial sequence
  EphA2r
tgctgttgacgaggatgttgcg

SEQ ID NO: 137 - DNA, 22 bp, artificial sequence
  EphA3r
tagttgtgatgctgactgcggc

SEQ ID NO: 138 - DNA, 22 bp, artificial sequence
  EphA4r
ttcaccattctgctcctcgtgc

SEQ ID NO: 139 - DNA, 22 bp, artificial sequence
  EphA5r
atagagagcagcagggcaatcc

SEQ ID NO: 140 - DNA, 22 bp, artificial sequence
  EphA6r
cagtgtgtcttgggatgaagcg

SEQ ID NO: 141 - DNA, 24 bp, artificial sequence
  EphA7r
atcccagcggcaatacctctcaac

SEQ ID NO: 142 - DNA, 24 bp, artificial sequence
  EphA8r
ggggcacttcttgtagtagattcg

SEQ ID NO: 143 - DNA, 42 bp, artificial sequence
  ephrin-A5 siRNA 1f
attaatacgactcactataggcaagccagggttgatgagtag

SEQ ID NO: 144 - DNA, 41 bp, artificial sequence
  ephrin-A5 siRNA 2f
attaatacgactcactataggagctgattgccaggaaacac

SEQ ID NO: 145 - DNA, 45 bp, artificial sequence
  ephrin-A5 siRNA 1r
cgtaatacgactcactataggtcacaagtttaaataggacaagca

SEQ ID NO: 146 - DNA, 41 bp, artificial sequence
  ephrin-A5 siRNA 2r
cgtaatacgactcactataggaaatgttgggtgccttctgt

SEQ ID NO: 147 - DNA, 23 bp, artificial sequence
  ephrin-A5f
tgttgacgctgctctttctggtg

SEQ ID NO: 148 - DNA, 21 bp, artificial sequence
  a-tubulinf
ctttgagccagccaaccagat

SEQ ID NO: 149 - DNA, 22 bp, artificial sequence
  ephrin-A5r
aatctggggttgctgctgttcc

SEQ ID NO: 150 - DNA, 19 bp, artificial sequence
  a-tubulinr
ttgatggtggcaatggcag

SEQ ID NO: 151 - DNA, 39 bp, artificial sequence
  Cx36 siRNA 1f
attaatacgactcactataggagggcaggtttggggaag

SEQ ID NO: 152 - DNA, 41 bp, artificial sequence
  Cx36 siRNA 2f
attaatacgactcactatagggcatgccagcttttcttttt

SEQ ID NO: 153 - DNA, 41 bp, artificial sequence
  Cx36 siRNA 1r
cgtaatacgactcactataggggccagatgaaggaaaaaga

SEQ ID NO: 154 - DNA, 41 bp, artificial sequence
  Cx36 siRNA 2r
cgtaatacgactcactataggcgggctgattaaggtctctg

SEQ ID NO: 155 - DNA, 20 bp, artificial sequence
  Cx36f
acggtgtacgatgatgagca

SEQ ID NO: 156 - DNA, 20 bp, artificial sequence
  Cx36r
gtagagtaccggcgttctcg
